(19) United States
(12) Patent Application Publication
(10) Pub. No.: US 2010/0261881 A1
(43) Pub. Date: Oct. 14, 2010

(54) MARKER SEQUENCES FOR RHEUMATOID ARTHRITIS AND USE THEREOF

(75) Inventors: Jens Beator, Kreiensen (DE); Angelika Lüking, Bochum (DE); Axel Kowald, Bochum (DE); Helmut E. Meyer, Recklinghausen (DE)

Correspondence Address: CONNOLLY BOVE LODGE & HUTZ, LLP, P O BOX 2207, WILMINGTON, DE, 19899, US

(73) Assignee: Protagen AG, Dortmund (DE)

(21) Appl. No.: 12/676,223

(22) PCT Filed: Sep. 3, 2008
(86) PCT No.: PCT/DE08/01547

§ 371 Date: Jun. 21, 2010

(30) Foreign Application Priority Data
Sep. 3, 2007 (DE) 10 2007 041 654.9
Sep. 3, 2007 (DE) 10 2007 041 656.5

(51) Int. Cl. C07K 14/00; C07H 21/04

(52) U.S. Cl. 530/350; 536/23.1

(57) ABSTRACT

The present invention relates to new marker sequences for rheumatoid arthritis and the diagnostic use thereof together with a method for screening of potential active substances for rheumatoid arthritis by means of these marker sequences. Furthermore, the invention relates to a diagnostic device containing such marker sequences for rheumatoid arthritis, in particular a protein biochip and the use thereof.

[0001] The present invention relates to new marker sequences for rheumatoid arthritis and the diagnostic use thereof together with a method for screening potential active substances for rheumatoid arthritis by means of these marker sequences. Furthermore, the invention relates to a diagnostic device containing marker sequences of this type for rheumatoid arthritis, in particular a protein biochip and the use thereof.

[0002] Protein biochips are gaining increasing industrial importance in analysis and diagnosis as well as in pharmaceutical development. Protein biochips have become established as screening instruments.

[0003] The rapid and highly parallel detection of a multiplicity of specifically binding analysis molecules in a single experiment is rendered possible hereby. To produce protein biochips, it is necessary to have the required proteins available. For this purpose, in particular protein expression libraries have become established. The high throughput cloning of defined open reading frames is one possibility (Heyman, J. A., Cornthwaite, J., Foncerrada, L., Gilmore, J. R., Gontang, E., Hartman, K. J., Hernandez, C. L., Hood, R., Hull, H. M., Lee, W. Y., Marcil, R., Marsh, E. J., Mudd, K. M., Patino, M. J., Purcell, T. J., Rowland, J. J., Sindici, M. L. and Hoeffler, J. P., (1999) Genome-scale cloning and expression of individual open reading frames using topoisomerase I-mediated ligation. Genome Res, 9, 383-392; Kersten, B., Feilner, T., Kramer, A., Wehrmeyer, S., Possling, A., Witt, I., Zanor, M. I., Stracke, R., Lucking, A., Kreutzberger, J., Lehrach, H. and Cahill, D. J. (2003) Generation of Arabidopsis protein chip for antibody and serum screening. Plant Molecular Biology, 52, 999-1010; Reboul, J., Reboul, J., Vaglio, P., Rual, J. F., Lamesch, P., Martinez, M., Armstrong, C M., Li, S., Jacotot, L., Bertin, N., Janky, R., Moore, T., Hudson, J. R., Jr., Hartley, J. L., Brasch, M. A., Vandenhaute, J., Boulton, S., Endress, G. A., Jenna, S., Chevet, E., Papasotiropoulos, V., Tolias, P. P., Ptacek, J., Snyder, M., Huang, R., Chance, M. R., Lee, H., Doucette-Stamm, L., Hill, D. E. and Vidal, M. (2003) C. elegans ORFeome Version 1.1: experimental verification of the genome annotation and resource for proteome-scale protein expression. Nat Genet, 34, 35-41.; Walhout, A. J., Temple, G. F., Brasch, M. A., Hartley, J. L., Lorson, M. A., van den Heuvel, S. and Vidal, M. (2000) GATEWAY recombinational cloning: application to the cloning of large numbers of open reading frames or ORFeomes. Methods Enzymol, 328, 575-592). However, an approach of this type is strongly connected to the progress of the genome sequencing projects and the annotation of these gene sequences. Furthermore, the determination of the expressed sequence can be ambiguous due to differential splicing processes. This problem may be circumvented by the application of cDNA expression libraries (Büssow, K., Cahill, D., Nietfeld, W., Bancroft, D., Scherzinger, E., Lehrach, H. and Walter, G. (1998) A method for global protein expression and antibody screening on high-density filters of an arrayed cDNA library. Nucleic Acids Research, 26, 5007-5008; Büssow, K., Nordhoff, E., Lübbert, C, Lehrach, H. and Walter, G. (2000) A human cDNA library for high-throughput protein expression screening. Genomics, 65, 1-8; Holz, C, Lueking, A., Bovekamp, L., Gutjahr, C, Bolotina, N., Lehrach, H. and Cahill, D. J. (2001) A human cDNA expression library in yeast enriched for open reading frames. Genome Res, 11, 1730-1735; Lucking, A., Holz, C, Gotthold, C, Lehrach, H. and Cahill, D. (2000) A system for dual protein expression in Pichia pastoris and Escherichia coli, Protein Expr. Purif., 20, 372-378). The cDNA of a particular tissue is hereby cloned into a bacterial or an eukaryotic expression vector, such as, e.g., yeast. The vectors used for the expression are generally characterized in that they carry inducible promoters that may be used to control the time of protein expression. Furthermore, expression vectors have sequences for so-called affinity epitopes or affinity proteins, which on the one hand permit the specific detection of the recombinant fusion proteins by means of an antibody directed against the affinity epitope, and on the other hand the specific purification via affinity chromatography (IMAC) is rendered possible.

[0004] For example, the gene products of a cDNA expression library from human fetal brain tissue in the bacterial expression system Escherichia coli were arranged in high-density format on a membrane and could be successfully screened with different antibodies. It was possible to show that the proportion of full-length proteins is at least 66%. Additionally, the recombinant proteins from the library could be expressed and purified in a high-throughput manner (Braun P., Hu, Y., Shen, B., Halleck, A., Koundinya, M., Harlow, E. and LaBaer, J. (2002) Proteome-scale purification of human proteins from bacteria. Proc Natl Acad Sci U S A, 99, 2654-2659; Büssow (2000) supra; Lueking, A., Horn, M., Eickhoff, H., Büssow, K., Lehrach, H. and Walter, G. (1999) Protein microarrays for gene expression and antibody screening. Analytical Biochemistry, 270, 103-111). Protein biochips of this type based on cDNA expression libraries are in particular the subject matter of WO 99/57311 and WO 99/57312.

[0005] Furthermore, in addition to antigen-presenting protein biochips, antibody-presenting arrangements are likewise described (Lal et al (2002) Antibody arrays: An embryonic but rapidly growing technology, DDT, 7, 143-149; Kusnezow et al. (2003), Antibody microarrays: An evaluation of production parameters, Proteomics, 3, 254-264).

[0006] However, there is a great need to provide indication-specific diagnostic devices, such as a protein biochip.

[0007] Marker sequences and the diagnostic use thereof for rheumatoid arthritis, in particular in the embodiment of a protein biochip, as well as tests in this regard for the screening of active substances have not been described in the prior art.

[0008] The object of the present invention is therefore to provide marker sequences and their diagnostic use.

[0009] The provision of specific marker sequences permits a reliable diagnosis and stratification of patients with rheumatoid arthritis, in particular by means of a protein biochip.

[0010] The invention therefore relates to the use of marker sequences for the diagnosis of rheumatoid arthritis, wherein at least one marker sequence of a cDNA selected from the group SEQ 1-488 or respectively a protein coding therefor or respectively a partial sequence or fragment thereof (hereinafter: marker sequences according to the invention) is determined on or from a patient to be examined.

[0011] It was possible to identify the marker sequences according to the invention by means of differential screening of samples from healthy test subjects with patient samples with rheumatoid arthritis.

[0012] The term “rheumatoid arthritis (RA)” is defined, e.g., according to Pschyrembel, de Gruyter, 261st edition (2007), Berlin. According to the invention, “juvenile idiopathic arthritis” is likewise covered (ICD-10: M08.-. Abbr.: JIA. Older synonyms: juvenile rheumatoid arthritis, juvenile chronic arthritis, Morbus Still or more popularly: childhood rheumatism), which a collective term for a number of primarily arthrotopic diseases (arthritis) of the category of rheumatic diseases in childhood (juvenile) (Definition e.g., according to Pschyrembel, de Gruyter, 261^{st} edition (2007), Berlin). This is a polygenic disease, which can be diagnosed particularly advantageously by means of the marker sequences according to the invention, preferably by the marker sequences SEQ 401-488.

[0013] In a further embodiment at least 2 to 5 or 10, preferably 30 to 50 marker sequences or 50 to 100 or more marker sequences are determined on or from a patient to be examined.

[0014] In a particular embodiment of the invention, the marker sequences of the SEQ 1-20 are particularly preferred, the marker sequences SEQ 21-50 are preferred, and furthermore the marker sequences SEQ 51-100 are preferred.

[0015] In a further embodiment of the invention, the marker sequences SEQ 1-10 and SEQ 11-20, as well as preferably SEQ 21-30, SEQ 31-40 or SEQ 41-50 are respectively particularly preferred.

[0016] Furthermore preferred are the marker sequences SEQ 401-488 for the diagnosis of juvenile rheumatoid arthritis, in particular SEQ 401-420, SEQ 421-440, SEQ 441-460 and SEQ 461-488.

[0017] In a further embodiment of the invention, the marker sequences according to the invention can likewise be combined, supplemented, fused or expanded likewise with known biomarkers for this indication.

[0018] In a preferred embodiment, the determination of the marker sequences is carried out outside the human body and the determination is carried out in an ex vivo/in vitro diagnosis.

[0019] In a further embodiment of the invention, the invention relates to the use of marker sequences as diagnostic agents, wherein at least one marker sequence of a cDNA is selected from the group SEQ 1-488 or respectively a protein coding therefor or respectively a partial sequence or fragment thereof.

[0020] Furthermore, the invention relates to a method for the diagnosis of rheumatoid arthritis, wherein a.) at least one marker sequence of a cDNA selected from the group SEQ 1-488 or respectively a protein coding therefor or respectively a partial sequence or fragment thereof is applied to a solid support and b.) is brought into contact with body fluid or tissue extract of a patient and c.) the detection of an interaction of the body fluid or tissue extract with the marker sequences from a.) is carried out.

[0021] The invention therefore likewise relates to diagnostic agents for the diagnosis of rheumatoid arthritis respectively selected from the group SEQ 1-488 or respectively a protein coding therefor or respectively a partial sequence or fragment thereof.

[0022] The detection of an interaction of this type can be carried out, for example, by a probe, in particular by an antibody.

[0023] The invention therefore likewise relates to the object of providing a diagnostic device or an assay, in particular a protein biochip, which permits a diagnosis or examination for rheumatoid arthritis.

[0024] Furthermore, the invention relates to a method for the stratification, in particular risk stratification and/or therapy control of a patient with rheumatoid arthritis, wherein at least one marker sequence of a cDNA selected from the group SEQ 1-488 or respectively a protein coding therefor is determined on a patient to be examined.

[0025] Furthermore, the stratification of the patients with rheumatoid arthritis in new or established subgroups of rheumatoid arthritis is also covered, as well as the expedient selection of patient groups for the clinical development of new therapeutic agents. The term therapy control likewise covers the allocation of patients to responders and non-responders regarding a therapy or the therapy course thereof.

[0026] “Diagnosis” for the purposes of this invention means the positive determination of rheumatoid arthritis by means of the marker sequences according to the invention as well as the assignment of the patients to rheumatoid arthritis. The term diagnosis covers medical diagnostics and examinations in this regard, in particular in-vitro diagnostics and laboratory diagnostics, likewise proteomics and nucleic acid blotting. Further tests can be necessary to be sure and to exclude other diseases. The term diagnosis therefore likewise covers the differential diagnosis of rheumatoid arthritis by means of the marker sequences according to the invention and the prognosis of rheumatoid arthritis.

[0027] “Stratification or therapy control” for the purposes of this invention means that the method according to the invention renders possible decisions for the treatment and therapy of the patient, whether it is the hospitalization of the patient, the use, effect and/or dosage of one or more drugs, a therapeutic measure or the monitoring of a course of the disease and the course of therapy or etiology or classification of a disease, e.g., into a new or existing subtype or the differentiation of diseases and the patients thereof.

[0028] In a further embodiment of the invention, the term “stratification” covers in particular the risk stratification with the prognosis of an outcome of a negative health event.

[0029] Within the scope of this invention, “patient” means any test subject—human or mammal—with the proviso that the test subject is tested for rheumatoid arthritis.

[0030] The term “marker sequences” for the purposes of this invention means that the cDNA or the polypeptide or protein that can be respectively obtained therefrom are significant for rheumatoid arthritis. For example, the cDNA or the polypeptide or protein that can be respectively obtained therefrom can exhibit an interaction with substances from the body fluid or tissue extract of a patient with rheumatoid arthritis (e.g., antigen (epitope)/antibody (paratope) interaction). For the purposes of the invention “wherein at least one marker sequence of a cDNA selected from the group SEQ 1-488 or respectively a protein coding therefor or respectively a partial sequence or fragment thereof is determined on a patient to be examined” means that an interaction between the body fluid or tissue extract of a patient and the marker sequences according to the invention is detected. An interaction of this type is, e.g., a bond, in particular a binding substance on at least one marker sequence according to the invention or in the case of a cDNA the hybridization with a suitable substance under selected conditions, in particular stringent conditions (e.g., such as usually defined in J. Sambrook, E. F. Fritsch, T. Maniatis (1989), Molecular cloning: A laboratory manual, 2nd Edition, Cold Spring Harbor Laboratory Press, Cold Spring Harbor, USA or Ausubel, “Current Protocols in Molecular Biology,” Green Publishing Associates and Wiley Interscience, N. Y. (1989)) . One example of stringent hybridization conditions is: hybridization in 4 x SSC at 65° C. (alternatively in 50% formamide and 4 x SSC at 42° C.), followed by several washing steps in 0.1 x SSC at 65° C. for a total of approximately one hour. An example of less stringent hybridization conditions is hybridization in 4 x SSC at 37° C., followed by several washing steps in 1 x SSC at room temperature.

[0031] According to the invention, substances of this type are constituents of a body fluid, in particular blood, whole blood, blood plasma, blood serum, patient serum, urine, cerebrospinal fluid, synovial fluid or of a tissue extract of the patient.

[0032] In a further embodiment of the invention, however, the marker sequences according to the invention can be present in a significantly higher or lower expression rate or concentration that indicates rheumatoid arthritis. The relative sick/healthy expression rates of the marker sequences for rheumatoid arthritis according to the invention are hereby determined by means of proteomics or nucleic acid blotting.

[0033] In a further embodiment of the invention, the marker sequences have a recognition signal that is addressed to the substance to be bound (e.g., antibody, nucleic acid). It is preferred according to the invention for a protein the recognition signal is an epitope and/or a paratope and/or a hapten and for a cDNA is a hybridization or binding region.

[0034] The marker sequences according to the invention are the subject matter of Table A and can be clearly identified by the respectively cited database entry (also by means of the Internet: http://www.ncbi.nlm.nih.gov/) (see in Table A: accession no. there).

[0035] According to the invention, the marker sequences also cover those modifications of the cDNA sequence and the corresponding amino acid sequence as chemical modification, such as citrullination, acetylation, phosphorylation, glycosylation or poly(A) strand and other modifications known to one skilled in the art.

[0036] In a further embodiment of the invention, partial sequences or fragments of the marker sequences according to the invention are likewise covered. In particular those partial sequences that have an identity of 95%, 90%, in particular 80% or 70% with the marker sequences according to the invention.

[0037] In a further embodiment, the respective marker sequence can be represented in different quantities in one more regions on a solid support. This permits a variation of the sensitivity. The regions can have respectively a totality of marker sequences, i.e., a sufficient number of different marker sequences, in particular 2 to 5 or 10 or more and optionally more nucleic acids and/or proteins, in particular biomarkers. However, at least 96 to 25,000 (numerical) or more from different or identical marker sequences and further nucleic acids and/or proteins, in particular biomarkers are preferred. Furthermore preferred are more than 2,5000, in particular preferred 10,000 or more different or identical marker sequences and optionally further nucleic acids and/or proteins, in particular biomarkers.

[0038] Another object of the invention relates to an arrangement of marker sequences containing at least one marker sequence of a cDNA selected from the group SEQ 1-488 or respectively a protein coding therefor. Preferably, the arrangement contains at least 2 to 5 or 10, preferably 30 to 50 marker sequences or 50 to 100 or more marker sequences.

[0039] Within the scope of this invention, “arrangement” is synonymous with “array,” and if this “array” is used to identify substances on marker sequences, this is to be understood to be an “assay” or diagnostic device. In a preferred embodiment, the arrangement is designed such that the marker sequences represented on the arrangement are present in the form of a grid on a solid support. Furthermore, those arrangements are preferred that permit a high-density arrangement of protein binders and the marker sequences are spotted. Such high-density spotted arrangements are disclosed, for example, in WO 99/57311 and WO 99/57312 and can be used advantageously in a robot-supported automated high-throughput method.

[0040] Within the scope of this invention, however, the term “assay” or diagnostic device likewise comprises those embodiments of a device, such as ELISA (e.g., individual wells of a microtiter plate are coated with the marker sequences or combinations of marker sequences according to the invention, optionally applied in a robot-supported manner in the individual wells of the microtiter plate; examples are diagnostic ELISA kits by Phadia or “Searchlight” multiplex ELISA kits by Pierce/Thermo Fisher Scientific), bead-based assay (spectrally distinguishable bead populations are coated with marker sequences/combinations of marker sequences. The patient sample is incubated with this bead population and bound (auto) antibodies are detected by means of a further fluorescence-labeled secondary antibody/detection reagent via measurement of the fluorescence; i.e., Borrelia IgG kit or Athena Multilyte by Multimetrix), line assay (marker sequences according to the invention or combinations of marker sequences are immobilized on membranes in a robot-supported manner, which are examined/incubated with the patient sample; example “Euroline” by Euroimmun AG), Western Blot (example “Euroline-WB” by Euroimmun AG), immunochromatographic methods (e.g., lateral flow immunoassays; marker sequences/combinations of marker sequences are immobilized on test strips (membranes, U.S. Pat. No. 5,714,389 and the like); example “One Step HBsAg” test device by Acon Laboratories) or similar immunological single or multiplex detection measures.

[0041] The marker sequences of the arrangement are fixed on a solid support, but preferably spotted or immobilized even printed on, i.e. applied in a reproducible manner. One or more marker sequences can be present multiple times in the totality of all marker sequences and present in different quantities based on one spot. Furthermore, the marker sequences can be standardized on the solid support (i.e., by means of serial dilution series of, e.g., human globulins as internal calibrators for data normalization and quantitative evaluation).

[0042] The invention therefore relates to an assay or a protein biochip comprising an arrangement containing marker sequences according to the invention.

[0043] In a further embodiment, the marker sequences are present as clones. Clones of this type can be obtained, for example, by means of a cDNA expression library according to the invention (Büssow et al. 1998 (supra)). In a preferred embodiment, such expression libraries containing clones are obtained using expression vectors from a cDNA expression library comprising the cDNA marker sequences. These expression vectors preferably contain inducible promoters. The induction of the expression can be carried out, e.g., by means of an inductor, such as IPTG. Suitable expression vectors are described in Terpe et al. (Terpe T Appl Microbiol Biotechnol. 2003 Jan; 60(5):523-33). One skilled in the art is familiar with expression libraries, they can be produced according to standard works, such as Sambrook et al, “Molecular Cloning, A laboratory handbook, 2nd edition (1989), CSH press, Cold Spring Harbor, N.Y. Expression libraries are also preferred which are tissue-specific (e.g., human tissue, in particular human organs). Furthermore included according to the invention are expression libraries that can be obtained by exon-trapping. A synonym for expression library is expression bank.

[0044] Also preferred are protein biochips or corresponding expression libraries that do not exhibit any redundancy (so-called: Uniclone® library) and that may be produced, for example, according to the teachings of WO 99/57311 and WO 99/57312. These preferred Uniclone libraries have a high portion of non-defective fully expressed proteins of a cDNA expression library.

[0045] Within the context of this invention, the clones can also be, but not limited to, transformed bacteria, recombinant phages or transformed cells from mammals, insects, fungi, yeasts or plants.

[0046] The clones are fixed, spotted or immobilized on a solid support.

[0047] The invention therefore relates to an arrangement wherein the marker sequences are present as clones.

[0048] Additionally, the marker sequences can be present in the respective form of a fusion protein, which contains, for example, at least one affinity epitope or tag. The tag may be one such as contains c-myc, his tag, arg tag, FLAG, alkaline phosphatase, VS tag, T7 tag or strep tag, HAT tag, NusA, S tag, SBP tag, thioredoxin, DsbA, a fusion protein, preferably a cellulose-binding domain, green fluorescent protein, maltose-binding protein, calmodulin-binding protein, glutathione S-transferase or lacZ.

[0049] A marker sequence can also be composed of several individual marker sequences. This can comprise the cloning of individual fragments to form a large common fragment and the expression of this combined fragment.

[0050] In all of the embodiments, the term “solid support” covers embodiments such as a filter, a membrane, a magnetic or fluorophore-labeled bead, a silica wafer, glass, metal, ceramics, plastics, a chip, a target for mass spectrometry or a matrix. However, a filter is preferred according to the invention.

[0051] As a filter, furthermore PVDF, nitrocellulose or nylon is preferred (e.g., Immobilon P Millipore, Protran Whatman, Hybond N+ Amersham).

[0052] In another preferred embodiment of the arrangement according to the invention, the arrangement corresponds to a grid with the dimensions of a microtiter plate (8-12 wells strips, 96 wells, 384 wells or more), a silica wafer, a chip, a target for mass spectrometry, or a matrix.

[0053] In a further embodiment, the invention relates to an assay or a protein biochip for identifying and characterizing a substance for rheumatoid arthritis, characterized in that an arrangement or assay according to the invention is a.) brought into contact with at least one substance to be tested and b.) a binding success is detected.

[0054] Furthermore, the invention relates to a method for identifying and characterizing a substance for rheumatoid arthritis, characterized in that an arrangement or assay according to the invention is a.) brought into contact with at least one substance to be tested and b.) a binding success is detected.

[0055] The substance to be tested can be any native or non-native biomolecule, a synthetic chemical molecule, a mixture or a substance library.

[0056] After the substance to be tested contacts a marker sequence, the binding success is evaluated, which, for example, is carried out using commercially available image analyzing software (GenePix Pro (Axon Laboratories), Aida (Ray test), ScanArray (Packard Bioscience).

[0057] The visualization of protein-protein interactions according to the invention (e.g., protein on marker sequence, as antigen/antibody) or corresponding “means for detecting the binding success” can be performed, for example, using fluorescence labeling, biotinylation, radioisotope labeling or colloid gold or latex particle labeling in the usual way. A detection of bound antibodies is carried out with the aid of secondary antibodies, which are labeled with commercially available reporter molecules (e.g., Cy, Alexa, Dyomics, FITC or similar fluorescent dyes, colloidal gold or latex particles), or with reporter enzymes, such as alkaline phosphatase, horseradish peroxidase, etc., and the corresponding colorimetric, fluorescent or chemiluminescent substrates. Readout is conducted, e.g., using a microarray laser scanner, a CCD camera or visually.

[0058] In a further embodiment, the invention relates to a drug/active substance or prodrug developed for rheumatoid arthritis and obtainable through the use of the assay or protein biochip according to the invention.

[0059] The invention therefore likewise relates to the use of an arrangement according to the invention or an assay for screening active substances for rheumatoid arthritis.

[0060] In a further embodiment, the invention therefore likewise relates to a target for the treatment and therapy of rheumatoid arthritis respectively selected from the group SEQ 1-488 or a protein respectively coding therefor.

[0061] In a further embodiment, the invention likewise relates to the use of the marker sequences according to the invention, preferably in the form of an arrangement, as an affinity material for carrying out an apheresis or in the broadest sense a blood lavage, wherein substances from body fluids of a patient with rheumatoid arthritis, such as blood or plasma, bind to the marker sequences according to the invention and consequently can be selectively withdrawn from the body fluid.

[0062] Examples and figures:

[0063] Ten or more patient samples were individually screened against a cDNA expression library. The rheumatoid arthritis-specific expression clones were determined through a comparison with ten or more healthy samples. The identity of the marker sequences was determined by DNA sequencing.

[0064] FIG. 1 shows the differential screening between two protein biochips from respectively one cDNA expression bank of a patient and a healthy test subject. The differential clones are detected by means of fluorescent labeling and evaluated by means of bioinformatics.

[0065] Table A:

1. Use of marker sequences for the diagnosis of rheumatoid arthritis, wherein at least one marker sequence of a cDNA selected from the group SEQ 1-488 or respectively a protein coding therefor or respectively a partial sequence or fragment thereof is determined on or from a patient to be examined.

2-18. (canceled)

The application's sequence listing, which the Patent Office published only in electronic form, follows.

SEQUENCE LISTING (488 sequences)

SEQ ID NO: 1 - DNA, 1200 bp, Homo Sapiens
  misc_feature (2)..(2): n is a, c, g, or t
  misc_feature (860)..(860): n is a, c, g, or t
  misc_feature (880)..(880): n is a, c, g, or t
  misc_feature (897)..(897): n is a, c, g, or t
  misc_feature (914)..(914): n is a, c, g, or t
  misc_feature (932)..(932): n is a, c, g, or t
  misc_feature (936)..(936): n is a, c, g, or t
  misc_feature (982)..(982): n is a, c, g, or t
  misc_feature (987)..(987): n is a, c, g, or t
  misc_feature (1025)..(1025): n is a, c, g, or t
  misc_feature (1040)..(1040): n is a, c, g, or t
  misc_feature (1048)..(1048): n is a, c, g, or t
  misc_feature (1055)..(1056): n is a, c, g, or t
  misc_feature (1065)..(1065): n is a, c, g, or t
  misc_feature (1070)..(1070): n is a, c, g, or t
  misc_feature (1077)..(1077): n is a, c, g, or t
  misc_feature (1080)..(1080): n is a, c, g, or t
  misc_feature (1082)..(1083): n is a, c, g, or t
  misc_feature (1085)..(1085): n is a, c, g, or t
  misc_feature (1091)..(1091): n is a, c, g, or t
  misc_feature (1095)..(1095): n is a, c, g, or t
  misc_feature (1097)..(1097): n is a, c, g, or t
  misc_feature (1099)..(1100): n is a, c, g, or t
  misc_feature (1113)..(1113): n is a, c, g, or t
  misc_feature (1117)..(1117): n is a, c, g, or t
  misc_feature (1120)..(1120): n is a, c, g, or t
  misc_feature (1130)..(1134): n is a, c, g, or t
  misc_feature (1136)..(1136): n is a, c, g, or t
  misc_feature (1139)..(1139): n is a, c, g, or t
  misc_feature (1148)..(1148): n is a, c, g, or t
  misc_feature (1151)..(1151): n is a, c, g, or t
  misc_feature (1155)..(1155): n is a, c, g, or t
  misc_feature (1158)..(1158): n is a, c, g, or t
  misc_feature (1162)..(1162): n is a, c, g, or t
  misc_feature (1164)..(1164): n is a, c, g, or t
  misc_feature (1169)..(1172): n is a, c, g, or t
  misc_feature (1175)..(1175): n is a, c, g, or t
  misc_feature (1178)..(1178): n is a, c, g, or t
  misc_feature (1181)..(1181): n is a, c, g, or t
  misc_feature (1185)..(1185): n is a, c, g, or t
  misc_feature (1187)..(1187): n is a, c, g, or t
  misc_feature (1189)..(1192): n is a, c, g, or t
  misc_feature (1195)..(1195): n is a, c, g, or t
  misc_feature (1198)..(1198): n is a, c, g, or t
  misc_feature (1200)..(1200): n is a, c, g, or t
antgagaaattactatgagaggatcgcatcaccatcaccatcacgggatcctatttaggtgacactatagaatcgtcgacccacgcgtccgcccacgcgtccgagaagttggaactgaaagtgaaagaacagaaggactattgggagacagagctgcttcaactgaaagaacaaaaccagaagatgtcctcagaaaatgagaagatgggaatcagagtggatcagcttcaggcccagctgtcaactcaagagaaagaaatggagaagcttgttcagggagatcaagataagacagagcagttagagcagctgaaaaaggaaaatgaccacctctttctcagtttaactgaacagaggaaggaccagaagaagctcgagcagacagtggagcaaatgaagcagaatgaaactactgcaatgaagaaacaacaggaattaatggatgaaaactttgacctgtcaaaaagactgagtgagaacgaaattatatgtaatgctctgcagagacagaaagagagattggaaggagaaaatgatcttttgaagagggagaacagcagattgctcagttacatgggtctggattttaattctttgccgtatcaagtacctacttcagatgaaggaggcgcaagacaaaatccaggacttgcctatggaaacccatattctggtatccaagaaagttcttcccccagcccgctctccatcaagaaatgccctatctgcaaagcagatgatatttgtgatcacaccttggagcaacagcagatgcagcccctttgtttcaattgtccaatttgtgacaagatcttcccagctacagagaagcagatctttgaagaccacgtgttctgccnctctctctgagtatccccancctcttggatgtatacngagattttatagaatanaacctatagcttctaccntganttatatgagtcaagatcctgcctaacctgaaattattagggatttnctccnccctgctgcccctaacaggggagttttgtccctgatcngaaggtccctgttangggcttcngctgccnncctgggggntgctncctttantcncnnanctctanctgnancnncccccccccggcnttcntcngaggggtccnnnnnanggnccctggganggncccnccngggntnttccnnnnggnccnganttgnancnnnnggnttntn

SEQ ID NO: 2 - DNA, 1310 bp, Homo Sapiens
  misc_feature (818)..(818): n is a, c, g, or t
  misc_feature (887)..(887): n is a, c, g, or t
  misc_feature (889)..(889): n is a, c, g, or t
  misc_feature (913)..(913): n is a, c, g, or t
  misc_feature (949)..(949): n is a, c, g, or t
  misc_feature (977)..(977): n is a, c, g, or t
  misc_feature (979)..(979): n is a, c, g, or t
  misc_feature (1001)..(1001): n is a, c, g, or t
  misc_feature (1006)..(1006): n is a, c, g, or t
  misc_feature (1010)..(1010): n is a, c, g, or t
  misc_feature (1014)..(1015): n is a, c, g, or t
  misc_feature (1026)..(1026): n is a, c, g, or t
  misc_feature (1039)..(1039): n is a, c, g, or t
  misc_feature (1045)..(1045): n is a, c, g, or t
  misc_feature (1062)..(1088): n is a, c, g, or t
  misc_feature (1097)..(1097): n is a, c, g, or t
  misc_feature (1100)..(1100): n is a, c, g, or t
  misc_feature (1108)..(1108): n is a, c, g, or t
  misc_feature (1112)..(1113): n is a, c, g, or t
  misc_feature (1115)..(1115): n is a, c, g, or t
  misc_feature (1119)..(1119): n is a, c, g, or t
  misc_feature (1122)..(1122): n is a, c, g, or t
  misc_feature (1132)..(1132): n is a, c, g, or t
  misc_feature (1134)..(1134): n is a, c, g, or t
  misc_feature (1137)..(1137): n is a, c, g, or t
  misc_feature (1142)..(1142): n is a, c, g, or t
  misc_feature (1145)..(1145): n is a, c, g, or t
  misc_feature (1149)..(1149): n is a, c, g, or t
  misc_feature (1152)..(1152): n is a, c, g, or t
  misc_feature (1162)..(1164): n is a, c, g, or t
  misc_feature (1169)..(1169): n is a, c, g, or t
  misc_feature (1174)..(1174): n is a, c, g, or t
  misc_feature (1177)..(1178): n is a, c, g, or t
  misc_feature (1182)..(1182): n is a, c, g, or t
  misc_feature (1184)..(1184): n is a, c, g, or t
  misc_feature (1192)..(1192): n is a, c, g, or t
  misc_feature (1200)..(1200): n is a, c, g, or t
  misc_feature (1202)..(1204): n is a, c, g, or t
  misc_feature (1206)..(1206): n is a, c, g, or t
  misc_feature (1209)..(1209): n is a, c, g, or t
  misc_feature (1219)..(1219): n is a, c, g, or t
  misc_feature (1227)..(1227): n is a, c, g, or t
  misc_feature (1232)..(1232): n is a, c, g, or t
  misc_feature (1236)..(1236): n is a, c, g, or t
  misc_feature (1239)..(1242): n is a, c, g, or t
  misc_feature (1244)..(1245): n is a, c, g, or t
  misc_feature (1254)..(1255): n is a, c, g, or t
  misc_feature (1260)..(1260): n is a, c, g, or t
  misc_feature (1264)..(1267): n is a, c, g, or t
  misc_feature (1271)..(1274): n is a, c, g, or t
  misc_feature (1277)..(1278): n is a, c, g, or t
  misc_feature (1281)..(1282): n is a, c, g, or t
  misc_feature (1289)..(1289): n is a, c, g, or t
  misc_feature (1293)..(1293): n is a, c, g, or t
  misc_feature (1304)..(1304): n is a, c, g, or t
  misc_feature (1308)..(1308): n is a, c, g, or t
  misc_feature (1310)..(1310): n is a, c, g, or t
gagaaattactatgagaggatcgcatcaccatcaccatcacggatcctatttaggtgacactatagaatcgtcgacccacgcgtccgcccacgcgtccgccgaatggctggctgtggatgggttggtcagtccctccaacaacagcaaggaggatgccttctccgggacagattggatgttggagaaaatggatttgaaggagttcgacttggatgccctgttgggtatagatgacctggaaaccatgccagatgaccttctgaccacgttggatgacacttgtgatctctttgcccccctagtccaggagactaataagcagcccccccagacggtgaacccaattggccatctcccagaaagtttaacaaaacccgaccaggttgcccccttcaccttcttacaacctcttcccctttccccaggggtcctgtcctccactccagatcattcctttagtttagagctgggcagtgaagtggatatcactgaaggagataggaagccagactacactgcttacgttgccatgatccctcagtgcataaaggaggaagacaccccttcagataatgatagtggcatctgtatgagcccagagtcctatctggggtctcctcagcacagcccctctaccaggggctctccaaataggagcctcccatctccaggtgttctctgtgggtctgcccgtcccaaaccttacgatcctcctggagagaagatggtagcagcaaaagtaaagggtgagaaactggataagaagctgaaaaaaatggagcaaaacaagacagcagccactaggtaccgccagaanaagagggcggagcaggaggctcttactggtgagtgcaaagagctggaaaagaagaacgaggctctaaananagggcggattccctggccaagganatccagtacctgaaaaattgataaaaaagtccgcanggcaagggggaaaaaaagggtcccctantngaggaaatcaggagcgtcatgngcttntaanaaanngctgtaactgngggttccaataantatttngtagggaaaaaaaaaannnnnnnnnnnnnnnnnnnnnnnnnnnggggggccnccnccccaaangggnncnaaanaancttaattaancnaanttggnacnccgnttnaaaaaatccnnnaaggnccccnaanncccncnggattttnttcaaaancnnngnttncccccggggntttttttntgggnaaanccnnnntnnttgggggannttttngggnnnngggnnnnaannggnnaaaaaancccngggaaaccccntaantn

SEQ ID NO: 3 - DNA, 1200 bp, Homo Sapiens
  misc_feature (1)..(1): n is a, c, g, or t
  misc_feature (4)..(4): n is a, c, g, or t
  misc_feature (740)..(740): n is a, c, g, or t
  misc_feature (797)..(797): n is a, c, g, or t
  misc_feature (823)..(823): n is a, c, g, or t
  misc_feature (829)..(829): n is a, c, g, or t
  misc_feature (838)..(838): n is a, c, g, or t
  misc_feature (874)..(874): n is a, c, g, or t
  misc_feature (885)..(886): n is a, c, g, or t
  misc_feature (889)..(889): n is a, c, g, or t
  misc_feature (902)..(902): n is a, c, g, or t
  misc_feature (908)..(908): n is a, c, g, or t
  misc_feature (933)..(933): n is a, c, g, or t
  misc_feature (937)..(937): n is a, c, g, or t
  misc_feature (943)..(944): n is a, c, g, or t
  misc_feature (959)..(959): n is a, c, g, or t
  misc_feature (963)..(963): n is a, c, g, or t
  misc_feature (973)..(973): n is a, c, g, or t
  misc_feature (980)..(980): n is a, c, g, or t
  misc_feature (989)..(989): n is a, c, g, or t
  misc_feature (1006)..(1006): n is a, c, g, or t
  misc_feature (1008)..(1008): n is a, c, g, or t
  misc_feature (1013)..(1013): n is a, c, g, or t
  misc_feature (1017)..(1017): n is a, c, g, or t
  misc_feature (1019)..(1019): n is a, c, g, or t
  misc_feature (1025)..(1025): n is a, c, g, or t
  misc_feature (1028)..(1028): n is a, c, g, or t
  misc_feature (1035)..(1036): n is a, c, g, or t
  misc_feature (1046)..(1046): n is a, c, g, or t
  misc_feature (1051)..(1051): n is a, c, g, or t
  misc_feature (1056)..(1056): n is a, c, g, or t
  misc_feature (1060)..(1060): n is a, c, g, or t
  misc_feature (1063)..(1064): n is a, c, g, or t
  misc_feature (1066)..(1070): n is a, c, g, or t
  misc_feature (1077)..(1078): n is a, c, g, or t
  misc_feature (1081)..(1083): n is a, c, g, or t
  misc_feature (1085)..(1085): n is a, c, g, or t
  misc_feature (1096)..(1096): n is a, c, g, or t
  misc_feature (1098)..(1098): n is a, c, g, or t
  misc_feature (1101)..(1101): n is a, c, g, or t
  misc_feature (1104)..(1105): n is a, c, g, or t
  misc_feature (1108)..(1108): n is a, c, g, or t
  misc_feature (1114)..(1114): n is a, c, g, or t
  misc_feature (1118)..(1118): n is a, c, g, or t
  misc_feature (1128)..(1128): n is a, c, g, or t
  misc_feature (1134)..(1135): n is a, c, g, or t
  misc_feature (1142)..(1142): n is a, c, g, or t
  misc_feature (1149)..(1149): n is a, c, g, or t
  misc_feature (1157)..(1158): n is a, c, g, or t
  misc_feature (1167)..(1167): n is a, c, g, or t
  misc_feature (1172)..(1172): n is a, c, g, or t
  misc_feature (1174)..(1175): n is a, c, g, or t
  misc_feature (1179)..(1181): n is a, c, g, or t
  misc_feature (1187)..(1188): n is a, c, g, or t
natngagaaattactatgagaggatcgcatcaccatcaccatcacggatcctatttaggtgacactatagaatcgtcgacccacgcgtccgcccaggacaagacaagccgctctgcactccctgatgcggcccctgtgaccaaagacagtggtcctgggagcacaagaggagaaaaggaagacacgttattgacaaccatgcttcgaaacggagctcccctcaccagactcccgagtgacaagctgaaagcagtcatccccccattcctacccccttccagttttgagctgtggagctctgatcggtcccggacgcgtcacaacgggaaggcagaccccatgaagactgcgctgccccagagagccagcaggggccaccccgtgggcggcgggggcacagacactacacccgtcaggcctgttaaatttccaagcctccccagaagcccagcctcttctgccaattctggaaacttcaaccactcgcctcattcatcgggcggctccagtgggataggtgtgagccggcacggtggggagctgcttaaccgctcaggtggcagcatagacaatgtcttgtcccaaatcgctgcccagaggaaaaaagcagccggattattggagcagaaacccagccatcggtcaagccctgtggggccagcaccggggtccagcccgtctgagcttccagcctcccctgcaggtggcagcgctcctgttggcaagaaattggagaccancaaaaggcctccatctggaacttccactacctccaagagcacctctccaaccctcangccctcccccttcaccaaagggcacnctgcanagtcctcantgtcttcctcgtcatcccatcggcagtcaaaaacantgggggctccnncantggcaccatccanaatgangatgaactgactggaattccttaanaaanttatcnnttgaaaaaatatcancccnattttttgangaacaanaaggtgganatggaaacgtttcttcnanctganttgnanggtganttnaaagganntgggaaattnaaaanaaaangggntcnngnnnnnaaatttnnggnnncnaatttttgaantnaanccnnggnaagggnaccnaaaaaaaaanttttannggaaacntttcaancttttccnntttcctttnaaaananngccnnnaaaacnngggccctggaaa

SEQ ID NO: 4 - DNA, 1308 bp, Homo Sapiens
  misc_feature (904)..(904): n is a, c, g, or t
  misc_feature (917)..(917): n is a, c, g, or t
  misc_feature (936)..(936): n is a, c, g, or t
  misc_feature (957)..(957): n is a, c, g, or t
  misc_feature (960)..(960): n is a, c, g, or t
  misc_feature (969)..(969): n is a, c, g, or t
  misc_feature (983)..(983): n is a, c, g, or t
  misc_feature (988)..(988): n is a, c, g, or t
  misc_feature (990)..(990): n is a, c, g, or t
  misc_feature (994)..(994): n is a, c, g, or t
  misc_feature (1007)..(1007): n is a, c, g, or t
  misc_feature (1013)..(1013): n is a, c, g, or t
  misc_feature (1022)..(1022): n is a, c, g, or t
  misc_feature (1040)..(1040): n is a, c, g, or t
  misc_feature (1066)..(1066): n is a, c, g, or t
  misc_feature (1069)..(1069): n is a, c, g, or t
  misc_feature (1082)..(1083): n is a, c, g, or t
  misc_feature (1089)..(1089): n is a, c, g, or t
  misc_feature (1093)..(1093): n is a, c, g, or t
  misc_feature (1108)..(1108): n is a, c, g, or t
  misc_feature (1110)..(1110): n is a, c, g, or t
  misc_feature (1118)..(1118): n is a, c, g, or t
  misc_feature (1121)..(1121): n is a, c, g, or t
  misc_feature (1131)..(1132): n is a, c, g, or t
  misc_feature (1137)..(1137): n is a, c, g, or t
  misc_feature (1141)..(1141): n is a, c, g, or t
  misc_feature (1148)..(1148): n is a, c, g, or t
  misc_feature (1150)..(1151): n is a, c, g, or t
  misc_feature (1156)..(1156): n is a, c, g, or t
  misc_feature (1163)..(1163): n is a, c, g, or t
  misc_feature (1166)..(1166): n is a, c, g, or t
  misc_feature (1175)..(1175): n is a, c, g, or t
  misc_feature (1186)..(1186): n is a, c, g, or t
  misc_feature (1188)..(1188): n is a, c, g, or t
  misc_feature (1194)..(1194): n is a, c, g, or t
  misc_feature (1197)..(1197): n is a, c, g, or t
  misc_feature (1201)..(1201): n is a, c, g, or t
  misc_feature (1203)..(1204): n is a, c, g, or t
  misc_feature (1212)..(1213): n is a, c, g, or t
  misc_feature (1215)..(1215): n is a, c, g, or t
  misc_feature (1217)..(1217): n is a, c, g, or t
  misc_feature (1221)..(1221): n is a, c, g, or t
  misc_feature (1243)..(1243): n is a, c, g, or t
  misc_feature (1250)..(1250): n is a, c, g, or t
  misc_feature (1263)..(1263): n is a, c, g, or t
  misc_feature (1276)..(1276): n is a, c, g, or t
  misc_feature (1281)..(1281): n is a, c, g, or t
  misc_feature (1283)..(1283): n is a, c, g, or t
  misc_feature (1285)..(1286): n is a, c, g, or t
  misc_feature (1298)..(1298): n is a, c, g, or t
attagagaaaattactatgagaggatcgcatcaccatcaccatcacggatcctatttaggtgacactatagaatcgtcgacccacgcgtccgcaactgaagaagaaattcaggaaatctgcttaaagatcttgcagctttatgctcggaaaaaggttgatctcacacacctggagggtgaagtggaaaaaagaaagcacgctatcgaagaggcaaaggcccaagcccggggcctgttgcctgggggcacacaggtgctggatggtacctcggggttctctcctgcccccaagctggtggaatcccccaaagaaggtaaagggagcaagccttccccactgtctgtgaagaacaccaagaggaggctggagggcgccaagaaagccaaggcggacagccccgtgaacggcttgccaaaggggcgagagagtcggagtcggagccggagccgtgagcagagctactcgaggtccccatcccgatcagcgtctcctaagaggaggaaaagtgacagcggctccacatctggtgggtccaagtcgcagagccgctcccggagcaggagtgactccccaccgagacaggccccccgcagcgctccctacaaaggctctgagattcggggctcccggaagtccaaggactgcaagtacccccagaagccacacaagtctcggagccggagttcttcccgttctcgaagcaggtcacgggagcgggcggataatccgggaaaatacaagaagaaaagtcattactacagagatcagcgacgagagcgctcgaggtcgtatgaacgcacaggccgtcgctatgagcgggaccaccctgggcacagcagggcatcggaggtgaggcggggttgcagtgactgggtggccgcagcccttccctggggaagtacntgatggctgcccntttgacccccggtggctgnccctttgacccccggggtgtngcntcttcaccncaaagtgggtcctnaaaanangaanttcctttttttgnaaattnttttgttcnaacttggaaaccttgggngggaattttggaaaattgggaaattnganggggaaccgggtnnaaaccnttgnttttcaaaaccgggntnctgggggnttncgggcccaannccttngggnccccgtngnnagggnttctaanttntgggaaacnatcttttttgnangggccnccntctntnnaaaaaaanntntnatgncccccccccccctttttttggngcgtggnccctggccatggncctgggtggtttntttgnananncccttttttccncttcccccaa

SEQ ID NO: 5 - DNA, 1200 bp, Homo Sapiens
  misc_feature (129)..(129): n is a, c, g, or t
  misc_feature (171)..(171): n is a, c, g, or t
  misc_feature (227)..(227): n is a, c, g, or t
  misc_feature (277)..(277): n is a, c, g, or t
  misc_feature (289)..(289): n is a, c, g, or t
  misc_feature (442)..(442): n is a, c, g, or t
  misc_feature (468)..(468): n is a, c, g, or t
  misc_feature (645)..(645): n is a, c, g, or t
  misc_feature (665)..(665): n is a, c, g, or t
  misc_feature (672)..(672): n is a, c, g, or t
  misc_feature (714)..(714): n is a, c, g, or t
  misc_feature (835)..(835): n is a, c, g, or t
  misc_feature (887)..(887): n is a, c, g, or t
  misc_feature (946)..(946): n is a, c, g, or t
  misc_feature (955)..(955): n is a, c, g, or t
  misc_feature (960)..(960): n is a, c, g, or t
  misc_feature (1026)..(1026): n is a, c, g, or t
  misc_feature (1030)..(1030): n is a, c, g, or t
  misc_feature (1045)..(1045): n is a, c, g, or t
  misc_feature (1050)..(1050): n is a, c, g, or t
  misc_feature (1053)..(1053): n is a, c, g, or t
  misc_feature (1057)..(1057): n is a, c, g, or t
  misc_feature (1060)..(1060): n is a, c, g, or t
  misc_feature (1072)..(1072): n is a, c, g, or t
  misc_feature (1080)..(1081): n is a, c, g, or t
  misc_feature (1094)..(1094): n is a, c, g, or t
  misc_feature (1105)..(1105): n is a, c, g, or t
  misc_feature (1114)..(1114): n is a, c, g, or t
  misc_feature (1118)..(1118): n is a, c, g, or t
  misc_feature (1121)..(1121): n is a, c, g, or t
  misc_feature (1130)..(1131): n is a, c, g, or t
  misc_feature (1140)..(1140): n is a, c, g, or t
  misc_feature (1147)..(1147): n is a, c, g, or t
  misc_feature (1149)..(1149): n is a, c, g, or t
  misc_feature (1152)..(1154): n is a, c, g, or t
  misc_feature (1156)..(1156): n is a, c, g, or t
  misc_feature (1166)..(1168): n is a, c, g, or t
  misc_feature (1175)..(1175): n is a, c, g, or t
  misc_feature (1191)..(1191): n is a, c, g, or t
  misc_feature (1194)..(1195): n is a, c, g, or t
tagagaaattactatgagaggatcgcatcaccatcaccatcacggatcctatttaggtgacactatagaatcgtcgacccacgcgtccgcccacgcgtccgcccacgcggtccgcccacgcgctccggntgcagctcgggacttcggcctgacccagcccccatggcttcngaagagctacagaaagatctagaagaggtaaaggtgttgctggaaaaggctactangaaaagagtacgtgatgcccttacagctgaaaaatccaagattgagacanaaatcaagaacnagatgcaacagaaatcacagaagaaagcagaacttcttgataatgaaaaaccagctgctgtggttgctcccattacaacgggctatacggtgaaaatcagtaattatggatgggatcagtcagataagtttgtgaaaatctacattaccttanctggagttcatcaagttcccactganaatgtgcaggtgcatttcacagagaggtcatttgatcttttggtaaagaatctaaatgggaagagttactccatgattgtgaacaatctcttgaaacccatctctgtggaaggcagttcaaaaaaagtcaagactgatacagttcttatattgtgtagaaagaaagtggaaaacacnaggtgggattacctgacccnggttganaaggagtgcaaagaaaaagagaagccctcctatgacactgtnacagatcctagtgagggattgatgaatgttctaaagaaaatttatgaagatggagacgatgatatgaagcgaaccattaataaagcctgggtggaatcaagagagaagcacgccaaagganacacggaattttgagactttaaagtcgttttgggaactgtgatgtgatgtgnaatactgatgttttccagtaagggaatattggtgagctgcatatataaatttgacaganagctatttncctanccttctaagtaaggcaatgaattctcctttcctactggaggatttatttaataaaatatgcttatnaacnctcctgcaagaaggnttatnagnaccnggnccttttgttcangaaggttnnttgcttccccgtnaataaaaaacngtctgccanaaanccnacttggggnntttttttcnctaaatngnaannntngctggccttnnntacgccncccttccccaggaaantgnnaaccc

SEQ ID NO: 6 - DNA, 1326 bp, Homo Sapiens
  misc_feature (14)..(14): n is a, c, g, or t
  misc_feature (558)..(558): n is a, c, g, or t
  misc_feature (673)..(673): n is a, c, g, or t
  misc_feature (687)..(687): n is a, c, g, or t
  misc_feature (696)..(696): n is a, c, g, or t
  misc_feature (703)..(703): n is a, c, g, or t
  misc_feature (706)..(706): n is a, c, g, or t
  misc_feature (715)..(715): n is a, c, g, or t
  misc_feature (719)..(719): n is a, c, g, or t
  misc_feature (744)..(745): n is a, c, g, or t
  misc_feature (757)..(757): n is a, c, g, or t
  misc_feature (776)..(776): n is a, c, g, or t
  misc_feature (778)..(778): n is a, c, g, or t
  misc_feature (782)..(782): n is a, c, g, or t
  misc_feature (789)..(789): n is a, c, g, or t
  misc_feature (802)..(802): n is a, c, g, or t
  misc_feature (804)..(804): n is a, c, g, or t
  misc_feature (816)..(816): n is a, c, g, or t
  misc_feature (818)..(818): n is a, c, g, or t
  misc_feature (825)..(826): n is a, c, g, or t
  misc_feature (831)..(833): n is a, c, g, or t
  misc_feature (835)..(835): n is a, c, g, or t
  misc_feature (838)..(838): n is a, c, g, or t
  misc_feature (841)..(842): n is a, c, g, or t
  misc_feature (844)..(845): n is a, c, g, or t
  misc_feature (847)..(849): n is a, c, g, or t
  misc_feature (852)..(852): n is a, c, g, or t
  misc_feature (854)..(856): n is a, c, g, or t
  misc_feature (858)..(860): n is a, c, g, or t
  misc_feature (867)..(867): n is a, c, g, or t
  misc_feature (869)..(869): n is a, c, g, or t
  misc_feature (872)..(872): n is a, c, g, or t
  misc_feature (877)..(877): n is a, c, g, or t
  misc_feature (882)..(882): n is a, c, g, or t
  misc_feature (884)..(884): n is a, c, g, or t
  misc_feature (888)..(895): n is a, c, g, or t
  misc_feature (897)..(898): n is a, c, g, or t
  misc_feature (900)..(902): n is a, c, g, or t
  misc_feature (905)..(912): n is a, c, g, or t
  misc_feature (914)..(919): n is a, c, g, or t
  misc_feature (921)..(922): n is a, c, g, or t
  misc_feature (925)..(929): n is a, c, g, or t
  misc_feature (931)..(939): n is a, c, g, or t
  misc_feature (941)..(946): n is a, c, g, or t
  misc_feature (949)..(955): n is a, c, g, or t
  misc_feature (958)..(958): n is a, c, g, or t
  misc_feature (960)..(965): n is a, c, g, or t
  misc_feature (968)..(972): n is a, c, g, or t
  misc_feature (974)..(988): n is a, c, g, or t
  misc_feature (990)..(991): n is a, c, g, or t
  misc_feature (993)..(1014): n is a, c, g, or t
  misc_feature (1016)..(1021): n is a, c, g, or t
  misc_feature (1023)..(1044): n is a, c, g, or t
  misc_feature (1046)..(1066): n is a, c, g, or t
  misc_feature (1068)..(1079): n is a, c, g, or t
  misc_feature (1081)..(1087): n is a, c, g, or t
  misc_feature (1089)..(1091): n is a, c, g, or t
  misc_feature (1093)..(1154): n is a, c, g, or t
  misc_feature (1156)..(1160): n is a, c, g, or t
  misc_feature (1163)..(1188): n is a, c, g, or t
  misc_feature (1190)..(1190): n is a, c, g, or t
  misc_feature (1192)..(1295): n is a, c, g, or t
  misc_feature (1297)..(1322): n is a, c, g, or t
  misc_feature (1324)..(1326): n is a, c, g, or t
tagagaaaattacnatgagaggatcgcatcaccatcaccatcacggatcctatttaggtgacacatatagaatcgtcgacccacgcgtccgcccgtttccagcggtgccgccctgggtcccatcttcagggaaaggcactgcccacgccaggctgcacttccaacaacgggcagcagagggcgcggggcggctccgacgcgggtccaagggcagcttcccgctcaaccagggcaccaggacgaggtggctgtagctcggacggacggaagtagatggagggggtggggacggcctgtaagcggggggtgcctgcctggctggggagccccagggatagcggtcggacttcaggttctggccaaggctgagggaccctggctgcagcggatcggcacgccgggtgggcgagagcttggcctgcatgtgcctcccacagaccctggggtgatggccttccccctcttggccgggacgttgccccacgttgagtcccacacaacatcctgtgagcctggctccccaggagggcccccagacagctcccaggcacgtcatangcaaagcctgttcccccgactcaggatttccagggcctggggtcctgctcacccccctttgctctcacgcccagcctgtccccaggtttcagctgggagaggccacctccctcanccaaggaaaacganaacccccanggtacangangaggctggngcangtccccttgggtgtcactccctcannccctgcccaggnccactcccgctggtgctgnantacncactggngggggggccctgntnacccaaccttgnanggtccanntgtcnnnanaancanngnnannnaanannntnnnatggttntnaanccaanggccncnaatnnnnnnnnanngnnnggnnnnnnnnannnnnncnnaannnnnannnnnnnnnannnnnnaannnnnnncanannnnnnaannnnntnnnnnnnnnnnnnnnannannnnnnnnnnnnnnnnnnnnnntnnnnnnannnnnnnnnnnnnnnnnnnnnnannnnnnnnnnnnnnnnnnnnnannnnnnnnnnnntnnnnnnnannnannnnnnnnnnnnnnnnnnnnnnnnnnnnnnnnnnnnnnnnnnnnnnnnnnnnnnnnnnnnnnannnnnaannnnnnnnnnnnnnnnnnnnnnnnnntntnnnnnnnnnnnnnnnnnnnnnnnnnnnnnnnnnnnnnnnnnnnnnnnnnnnnnnnnnnnnnnnnnnnnnnnnnnnnnnnnnnnnnnnnnnnnnnnnnnnnnnnnannnnnnnnnnnnnnnnnnnnnnnnnntnnn

SEQ ID NO: 7 - DNA, 1200 bp, Homo Sapiens
  misc_feature (1)..(1): n is a, c, g, or t
  misc_feature (3)..(3): n is a, c, g, or t
  misc_feature (977)..(977): n is a, c, g, or t
  misc_feature (997)..(998): n is a, c, g, or t
  misc_feature (1049)..(1049): n is a, c, g, or t
  misc_feature (1055)..(1055): n is a, c, g, or t
  misc_feature (1058)..(1059): n is a, c, g, or t
  misc_feature (1064)..(1064): n is a, c, g, or t
  misc_feature (1070)..(1070): n is a, c, g, or t
  misc_feature (1075)..(1075): n is a, c, g, or t
  misc_feature (1082)..(1082): n is a, c, g, or t
  misc_feature (1085)..(1086): n is a, c, g, or t
  misc_feature (1091)..(1091): n is a, c, g, or t
  misc_feature (1094)..(1094): n is a, c, g, or t
  misc_feature (1097)..(1097): n is a, c, g, or t
  misc_feature (1107)..(1107): n is a, c, g, or t
  misc_feature (1111)..(1111): n is a, c, g, or t
  misc_feature (1116)..(1116): n is a, c, g, or t
  misc_feature (1125)..(1125): n is a, c, g, or t
  misc_feature (1129)..(1130): n is a, c, g, or t
  misc_feature (1133)..(1135): n is a, c, g, or t
  misc_feature (1144)..(1144): n is a, c, g, or t
  misc_feature (1148)..(1148): n is a, c, g, or t
  misc_feature (1151)..(1152): n is a, c, g, or t
  misc_feature (1160)..(1160): n is a, c, g, or t
  misc_feature (1165)..(1165): n is a, c, g, or t
  misc_feature (1176)..(1176): n is a, c, g, or t
  misc_feature (1197)..(1198): n is a, c, g, or t
nanttagagagaattactatgagaggatcgcatcaccatcaccatcacggatcctatttaggtgacactatagaatcgtcgacccacgcgtccgagcatggcggacgcagctcctcaactaggcaagaggaagcgcgaattggacgtggaggaggcccacgccgccagcacagaggaaaaggaggcaggagttggaaatggtacctgtgctcctgtccgcttaccgttctccggcttcagactgcagaaggtgctgagggagtctgcgcgggacaaaatcattttcctacacgggaaggtgaatgaggcctctggggatggggatggagaggatgccgttgtgatcctggagaagacgccatttcaggtggaacaggtggctcagctcctgacgggcagccctgagctccaattgcagttctccaatgatatctacagcacctatcacttgttccctccaagacaactgaatgatgtaaagacgaccgtggtttaccctgccacagagaaacacctgcagaagtacctgcgccaggacctccgcctgatccgagagacgggagatgactacaggaatattactttaccccacctggagtcccagagcctcagcatccagtgggtgtataacattctcgacaagaaggctgaagcggaccggattgttttcgagaacccagatccctctgatggttttgtcctcatccctgacctcaagtggaaccaacagcagctcgatgacttgtacttgatcgccatctgccatcgccggggcatcagatccctacgcgaccttactccggagcacttgccgctgctcaggaacatcctccaccaggggcaggaggccatcctgcagcgctaccggatgaagggagaccatctgcgagtatacctgcactacctgcccctcctactaccacctgcatgtgcacttcaccgccctgggcttcgaggcccccggctcaggcgtggancgggcccacctgctggctgnngtgatcgaaaacttggaagtggggaccttaggcactaccagcagcggaagnctcacnttnnccctncagggntgaanaaccccntgnntcaanctnttnggagggaggntcanccaancttgaattnactnncgnnnaaaaaaccnaaanttnngggaattnggggnaaaaatggggnaaaaaaattttttttttcccnngg

SEQ ID NO: 8 - DNA, 1135 bp, Homo Sapiens
  misc_feature (7)..(7): n is a, c, g, or t
  misc_feature (13)..(13): n is a, c, g, or t
  misc_feature (716)..(716): n is a, c, g, or t
  misc_feature (736)..(736): n is a, c, g, or t
  misc_feature (755)..(755): n is a, c, g, or t
  misc_feature (798)..(798): n is a, c, g, or t
  misc_feature (815)..(815): n is a, c, g, or t
  misc_feature (818)..(818): n is a, c, g, or t
  misc_feature (845)..(845): n is a, c, g, or t
  misc_feature (848)..(848): n is a, c, g, or t
  misc_feature (878)..(878): n is a, c, g, or t
  misc_feature (880)..(880): n is a, c, g, or t
  misc_feature (886)..(886): n is a, c, g, or t
  misc_feature (896)..(896): n is a, c, g, or t
  misc_feature (906)..(906): n is a, c, g, or t
  misc_feature (952)..(952): n is a, c, g, or t
  misc_feature (957)..(957): n is a, c, g, or t
  misc_feature (959)..(959): n is a, c, g, or t
  misc_feature (981)..(982): n is a, c, g, or t
  misc_feature (989)..(990): n is a, c, g, or t
  misc_feature (998)..(998): n is a, c, g, or t
  misc_feature (1002)..(1002): n is a, c, g, or t
  misc_feature (1005)..(1005): n is a, c, g, or t
  misc_feature (1008)..(1009): n is a, c, g, or t
  misc_feature (1013)..(1013): n is a, c, g, or t
  misc_feature (1016)..(1016): n is a, c, g, or t
  misc_feature (1024)..(1024): n is a, c, g, or t
  misc_feature (1027)..(1028): n is a, c, g, or t
  misc_feature (1035)..(1037): n is a, c, g, or t
  misc_feature (1043)..(1044): n is a, c, g, or t
  misc_feature (1052)..(1053): n is a, c, g, or t
  misc_feature (1061)..(1061): n is a, c, g, or t
  misc_feature (1063)..(1063): n is a, c, g, or t
  misc_feature (1067)..(1067): n is a, c, g, or t
  misc_feature (1070)..(1070): n is a, c, g, or t
  misc_feature (1075)..(1077): n is a, c, g, or t
  misc_feature (1081)..(1081): n is a, c, g, or t
  misc_feature (1100)..(1100): n is a, c, g, or t
  misc_feature (1116)..(1116): n is a, c, g, or t
  misc_feature (1123)..(1123): n is a, c, g, or t
  misc_feature (1130)..(1130): n is a, c, g, or t
  misc_feature (1133)..(1133): n is a, c, g, or t
aagaatnagaganaattactatgagaggatcgcatcaccatcaccattcacggatcctatttaggtgacactatagaatcgtcgacccacgcgtccgggcaaaaagagaagaaagaaaggggagggggcgagtcacaggcggcggtggcggcggcagcagctgccggagcggaggcaacgagcagtccgagaaaaaccagcagcagcggcggcggcggcggcggcggcgcccaccccgaccagctgcagcatctgcatccccgctcctgggaactggagcgagcggtgccgggccagcaggcgaggggggcgacgcgcagacagcgggtcagagcgcgggcgcgcggggaccgtgcagcctgcgcgcggggccatgtaaactatctaactgtggtgtggccctcttttctctgccatagcaattcaagaatcagaggtgatttgctcttgatgggagacatgaactattatatcatcagttgaacctgcttttagccactgagcagagcaaaacaataagatccaatacaccaactgtgatggttaatactgtcaacttgattggattgaacaatgcaaagtattgatcctgggtgtgtctgtgtgggtgttgccaaaggagattaacatttgagtcagtgggctggggaaggcagacccacccttaacctggtgggcacagtctaatcagctgccagtgaatatgaagcaggaanaaagacagtgaaaaggtganactggcctggcctccccanccctacatctttctcccatgctggatgcttcctgtcctcaaanactggaactccacgttnttncacttttgaaaacttgaaactgggctngtnccttttgcctccttcaaagctttgcaaaanangccctnattgtggggnaaactttgtnaattgtggtaaaattgaaatattaccaataaaattttccccctttntaatntnattattattatattttaatatnntatattnntattttanattnttntcnncccnggnaaaaattnttnntcccctnnntagggnnaaccctgnnatttattntncccnacnaccannnaatntttttatttttttgggggnaaaaaaaaaaaaaatncctttgncaaaaanaanaa

SEQ ID NO: 9 - DNA, 1200 bp, Homo Sapiens
  misc_feature (3)..(3): n is a, c, g, or t
  misc_feature (13)..(13): n is a, c, g, or t
  misc_feature (881)..(881): n is a, c, g, or t
  misc_feature (915)..(915): n is a, c, g, or t
  misc_feature (919)..(919): n is a, c, g, or t
  misc_feature (947)..(947): n is a, c, g, or t
  misc_feature (952)..(952): n is a, c, g, or t
  misc_feature (969)..(969): n is a, c, g, or t
  misc_feature (973)..(973): n is a, c, g, or t
  misc_feature (975)..(975): n is a, c, g, or t
  misc_feature (982)..(982): n is a, c, g, or t
  misc_feature (984)..(984): n is a, c, g, or t
  misc_feature (986)..(986): n is a, c, g, or t
  misc_feature (989)..(989): n is a, c, g, or t
  misc_feature (999)..(999): n is a, c, g, or t
  misc_feature (1005)..(1005): n is a, c, g, or t
  misc_feature (1008)..(1008): n is a, c, g, or t
  misc_feature (1033)..(1033): n is a, c, g, or t
  misc_feature (1041)..(1042): n is a, c, g, or t
  misc_feature (1053)..(1053): n is a, c, g, or t
  misc_feature (1055)..(1055): n is a, c, g, or t
  misc_feature (1078)..(1078): n is a, c, g, or t
  misc_feature (1091)..(1091): n is a, c, g, or t
  misc_feature (1093)..(1093): n is a, c, g, or t
  misc_feature (1096)..(1096): n is a, c, g, or t
  misc_feature (1104)..(1104): n is a, c, g, or t
  misc_feature (1113)..(1113): n is a, c, g, or t
  misc_feature (1117)..(1117): n is a, c, g, or t
  misc_feature (1120)..(1121): n is a, c, g, or t
  misc_feature (1124)..(1124): n is a, c, g, or t
  misc_feature (1126)..(1126): n is a, c, g, or t
  misc_feature (1131)..(1131): n is a, c, g, or t
  misc_feature (1133)..(1133): n is a, c, g, or t
  misc_feature (1137)..(1137): n is a, c, g, or t
  misc_feature (1139)..(1139): n is a, c, g, or t
  misc_feature (1143)..(1143): n is a, c, g, or t
  misc_feature (1145)..(1145): n is a, c, g, or t
  misc_feature (1147)..(1147): n is a, c, g, or t
  misc_feature (1149)..(1150): n is a, c, g, or t
  misc_feature (1163)..(1163): n is a, c, g, or t
  misc_feature (1165)..(1165): n is a, c, g, or t
  misc_feature (1168)..(1168): n is a, c, g, or t
  misc_feature (1173)..(1173): n is a, c, g, or t
  misc_feature (1175)..(1175): n is a, c, g, or t
  misc_feature (1177)..(1177): n is a, c, g, or t
  misc_feature (1180)..(1180): n is a, c, g, or t
  misc_feature (1189)..(1190): n is a, c, g, or t
  misc_feature (1192)..(1192): n is a, c, g, or t
  misc_feature (1194)..(1196): n is a, c, g, or t
  misc_feature (1198)..(1198): n is a, c, g, or t
ganttagagaganttaactatgagaggatcgcatcaccatcaccagtcacgggatcctatttaggtgacactatagaatcgtcgacccacgcgtccgtgaaggtccaggagcagatggccaactgccccaagttcgtccccgtggtgcccacatcacagcctatccccagcaacatccccaacaggtccaccttcgcctgcccgtactgtggtgcccgcaacctggaccagcaggagctggtgaagcactgtgtggaaagccaccgcagcgaccccaaccgcgtggtgtgccccatctgctcggcaatgccctggggggaccccagctacaagagcgccaacttcctgcagcacctgcttcaccgacacaagttctcctacgacacctttgtggactacagtattgacgaggaggccgccttccaggctgctctggccctgtctctctctgagaactgaagggaagcgcagccacccgcctgcgtctggggtcagggatgtccccgctcctgtgtcgcacctggcacctgctcgggagcgcacctcaccggactgagctcacaggaggagcctgcacccgcgcagaaggggagccggggccgagcctccgggcctgaatacgggccagccgccgaggccgccagagcagggccgcctggtcccaccggcgtcgctgggttcttcggtgcttctggccgagcaggcggcctacttgggcagggctggacgctgggacctggagctgccgccgtctcttcaaagccatgataccccctcgtgggaagaagggaccgacgcgcgagtcgcgctccgcagtcgagccgggaggaacccaggctgctgccctgcccagcccgaccctgcccccgccccgcttcacnttgcgcatttggtactggcttttgtgatacttangaancctggcatctttttctatattatccagnggganaatctttttcacgtttnatanancaaaaananancanttactcttcntattgnaanatctgtgtttgactaagaataaaantatttttnngggaaaatttnanaaaattatattttttaaaaaaanaaatcaaaaaaancnttngggggatnggggcaagnatgnaannaananggggnancttncnaaantnangnnaaccatggggttntnctnggggntngnccnggccccccnntntnnntngg

SEQ ID NO: 10 - DNA, 1200 bp, Homo Sapiens
  misc_feature (135)..(135): n is a, c, g, or t
  misc_feature (139)..(139): n is a, c, g, or t
  misc_feature (167)..(167): n is a, c, g, or t
  misc_feature (200)..(200): n is a, c, g, or t
  misc_feature (280)..(280): n is a, c, g, or t
  misc_feature (379)..(379): n is a, c, g, or t
  misc_feature (424)..(424): n is a, c, g, or t
  misc_feature (640)..(640): n is a, c, g, or t
  misc_feature (671)..(671): n is a, c, g, or t
  misc_feature (731)..(731): n is a, c, g, or t
  misc_feature (751)..(751): n is a, c, g, or t
  misc_feature (753)..(753): n is a, c, g, or t
  misc_feature (837)..(837): n is a, c, g, or t
  misc_feature (839)..(839): n is a, c, g, or t
  misc_feature (849)..(849): n is a, c, g, or t
  misc_feature (853)..(853): n is a, c, g, or t
  misc_feature (855)..(855): n is a, c, g, or t
  misc_feature (865)..(865): n is a, c, g, or t
  misc_feature (875)..(876): n is a, c, g, or t
  misc_feature (884)..(885): n is a, c, g, or t
  misc_feature (889)..(889): n is a, c, g, or t
  misc_feature (901)..(901): n is a, c, g, or t
  misc_feature (913)..(913): n is a, c, g, or t
  misc_feature (918)..(918): n is a, c, g, or t
  misc_feature (933)..(933): n is a, c, g, or t
  misc_feature (955)..(955): n is a, c, g, or t
  misc_feature (966)..(966): n is a, c, g, or t
  misc_feature (970)..(970): n is a, c, g, or t
  misc_feature (981)..(981): n is a, c, g, or t
  misc_feature (985)..(985): n is a, c, g, or t
  misc_feature (1003)..(1004): n is a, c, g, or t
  misc_feature (1014)..(1014): n is a, c, g, or t
  misc_feature (1018)..(1018): n is a, c, g, or t
  misc_feature (1021)..(1021): n is a, c, g, or t
  misc_feature (1024)..(1024): n is a, c, g, or t
  misc_feature (1030)..(1032): n is a, c, g, or t
  misc_feature (1079)..(1081): n is a, c, g, or t
  misc_feature (1089)..(1089): n is a, c, g, or t
  misc_feature (1092)..(1092): n is a, c, g, or t
  misc_feature (1096)..(1097): n is a, c, g, or t
  misc_feature (1099)..(1099): n is a, c, g, or t
  misc_feature (1101)..(1101): n is a, c, g, or t
  misc_feature (1103)..(1104): n is a, c, g, or t
  misc_feature (1108)..(1108): n is a, c, g, or t
  misc_feature (1113)..(1118): n is a, c, g, or t
  misc_feature (1121)..(1124): n is a, c, g, or t
  misc_feature (1131)..(1131): n is a, c, g, or t
  misc_feature (1133)..(1133): n is a, c, g, or t
  misc_feature (1137)..(1137): n is a, c, g, or t
  misc_feature (1147)..(1147): n is a, c, g, or t
  misc_feature (1149)..(1149): n is a, c, g, or t
  misc_feature (1156)..(1156): n is a, c, g, or t
  misc_feature (1164)..(1164): n is a, c, g, or t
  misc_feature (1168)..(1168): n is a, c, g, or t
  misc_feature (1170)..(1170): n is a, c, g, or t
  misc_feature (1179)..(1179): n is a, c, g, or t
  misc_feature (1187)..(1187): n is a, c, g, or t
  misc_feature (1196)..(1197): n is a, c, g, or t
tagagaaattactatgagaggatcgcatcaccatcaccatcacgggatcctatttaggtgacactatagaatcgtcgacccacgcgtccggtcggggaaaccagcacgatgtgccagtcattcctttggatgtanctancataatcagacagagaagttggacaccnacataactgaggtggatgcagcctccgtttacncgctgcctgctggagctgacttcctcatgtgttactctgttgcagaaggatattattctcaccgggaaactgtgaacggntcatggtacattcaagatttgtgtgagatgttgggaaaatatggctcctccttaaagttcacagaactcctcacactggtgaacaggaaagtttctcancgccgagtggacttttgcaaagacccaagtgcaattggaaagaancaggttccctgttttgcctcaatgctaactaaaaagctgcatttctttccaaaatctaattaattaatagaggctatctaattttacactctgtattgaaaatggctttctcagccaggcgtggttactcacacctgtaatcccagcactttgggagtccaaggtgggcggatcacctgaggtcgggagttcgagaccagcctgaccaacatgganaagccccgtctctactaaaaatgcaaaaaanaatttagctaggcatggcggcgcatgcctgcaatcccagctacttggaaggctgaggcangagaatcacttgaacccagnangtggaggctgcggtgagccgagattgcgccattgcactccagcctgggcaacgagtgaaactccgtctcaaaaaaaaaaaatgncnttctcttccnttanantaaatatcgntagggtgaanncattatgnnctantgattcaaatgnttttaaagttantgccnaccaaaaaactgccnttaaaaaaaaaaaaaaaatttncctgttggccntggngaaaggggttngaantggaaaaaccaaaatccnncggaaatttnaaanaanaanaatttnnnaaccattttgtatttatttttttaaaaaaccggccgggggttccccnnnaaaaaaanagncccnncnananntttnaaaannnnnntannnngggggcngncccnccccaagggnancccaatnaacctttnttancngacctgganccccggtnaaaattccnnaag

SEQ ID NO: 11 - DNA, 1328 bp, Homo Sapiens
  misc_feature (706)..(706): n is a, c, g, or t
  misc_feature (730)..(730): n is a, c, g, or t
  misc_feature (787)..(787): n is a, c, g, or t
  misc_feature (822)..(822): n is a, c, g, or t
  misc_feature (837)..(837): n is a, c, g, or t
  misc_feature (842)..(842): n is a, c, g, or t
  misc_feature (844)..(845): n is a, c, g, or t
  misc_feature (848)..(848): n is a, c, g, or t
  misc_feature (851)..(851): n is a, c, g, or t
  misc_feature (853)..(853): n is a, c, g, or t
  misc_feature (856)..(856): n is a, c, g, or t
  misc_feature (865)..(865): n is a, c, g, or t
  misc_feature (867)..(867): n is a, c, g, or t
  misc_feature (869)..(869): n is a, c, g, or t
  misc_feature (871)..(871): n is a, c, g, or t
  misc_feature (882)..(882): n is a, c, g, or t
  misc_feature (886)..(886): n is a, c, g, or t
  misc_feature (895)..(895): n is a, c, g, or t
  misc_feature (897)..(897): n is a, c, g, or t
  misc_feature (899)..(900): n is a, c, g, or t
  misc_feature (916)..(916): n is a, c, g, or t
  misc_feature (918)..(918): n is a, c, g, or t
  misc_feature (930)..(930): n is a, c, g, or t
  misc_feature (932)..(932): n is a, c, g, or t
  misc_feature (941)..(941): n is a, c, g, or t
  misc_feature (951)..(951): n is a, c, g, or t
  misc_feature (958)..(958): n is a, c, g, or t
  misc_feature (960)..(960): n is a, c, g, or t
  misc_feature (968)..(969): n is a, c, g, or t
  misc_feature (975)..(975): n is a, c, g, or t
  misc_feature (988)..(988): n is a, c, g, or t
  misc_feature (992)..(992): n is a, c, g, or t
  misc_feature (1001)..(1001): n is a, c, g, or t
  misc_feature (1006)..(1006): n is a, c, g, or t
  misc_feature (1019)..(1019): n is a, c, g, or t
  misc_feature (1028)..(1030): n is a, c, g, or t
  misc_feature (1032)..(1033): n is a, c, g, or t
  misc_feature (1038)..(1085): n is a, c, g, or t
  misc_feature (1097)..(1097): n is a, c, g, or t
  misc_feature (1104)..(1104): n is a, c, g, or t
  misc_feature (1106)..(1107): n is a, c, g, or t
  misc_feature (1118)..(1118): n is a, c, g, or t
  misc_feature (1135)..(1136): n is a, c, g, or t
  misc_feature (1138)..(1139): n is a, c, g, or t
  misc_feature (1157)..(1157): n is a, c, g, or t
  misc_feature (1161)..(1161): n is a, c, g, or t
  misc_feature (1172)..(1173): n is a, c, g, or t
  misc_feature (1179)..(1179): n is a, c, g, or t
  misc_feature (1186)..(1186): n is a, c, g, or t
  misc_feature (1202)..(1202): n is a, c, g, or t
  misc_feature (1210)..(1210): n is a, c, g, or t
  misc_feature (1220)..(1222): n is a, c, g, or t
  misc_feature (1232)..(1232): n is a, c, g, or t
  misc_feature (1249)..(1250): n is a, c, g, or t
  misc_feature (1257)..(1257): n is a, c, g, or t
  misc_feature (1260)..(1260): n is a, c, g, or t
  misc_feature (1264)..(1264): n is a, c, g, or t
  misc_feature (1266)..(1267): n is a, c, g, or t
  misc_feature (1275)..(1275): n is a, c, g, or t
  misc_feature (1282)..(1283): n is a, c, g, or t
  misc_feature (1286)..(1286): n is a, c, g, or t
  misc_feature (1289)..(1290): n is a, c, g, or t
  misc_feature (1293)..(1295): n is a, c, g, or t
  misc_feature (1299)..(1299): n is a, c, g, or t
  misc_feature (1301)..(1302): n is a, c, g, or t
  misc_feature (1305)..(1305): n is a, c, g, or t
  misc_feature (1315)..(1315): n is a, c, g, or t
  misc_feature (1317)..(1317): n is a, c, g, or t
  misc_feature (1319)..(1321): n is a, c, g, or t
  misc_feature (1324)..(1324): n is a, c, g, or t
gagagaattactatgagaggatcgcatcaccatcaccatcacggatcctatttaggtgacactatagaatcgtcgacccacgcgtccggagagaaaggctacgtgactcctgtgaagaatcagggtcagtgtggttcttgttgggcttttagtgctactggtgctcttgaaggacagatgttccggaaaactgggaggcttatctcactgagtgagcagaatctggtagactgctctgggcctcaaggcaatgaaggctgcaatggtggcctaatggattatgctttccagtatgttcaggataatggaggcctggactctgaggaatcctatccatatgaggcaacagaagaatcctgtaagtacaatcccaagtattctgttgctaatgacaccggctttgtggacatccctaagcaggagaaggccctgatgaaggcagttgcaactgtggggcccatttctgttgctattgatgcaggtcatgagtccttcctgttctataaagaaggcatttattttgagccagactgtagcagtgaagacatggatcatggtgtgctggtggttggctacggatttgaaagcacagaatcagataacaataaatattggctggtgaagaacagctggggtgaagaatggggcatgggtggctacgtaaagatggccaaagaccggagaaaccattgtggaattgcctcancagccagctaccccactgtgtganctggtggacggtgatgaagaaggacttgactggggatggcgcatgcatgggaagaantcatcttcagtctaccagcccccgctgtgtcgganacacactcgaatcantgaanannccnagngnganttgaattcngngnanattttcccccngggnaaatgttancncnnattttaattaccggcnanaaaaaaggtttnanttattggantccccttacngaccttncnattttccnntttttnaaaaggaaggtanaaantttttaccnggttnaaaaaaaaatttnaatttcccnnnannaaaannnnnnnnnnnnnnnnnnnnnnnnnnnnnnnnnnnnnnnnnnnnnnnnggggggggcccnccccccnannaagggggcccnaataaacctttaatttnncnnaaaccttggaacccccgntttnaaaaaaccccnnaaaggnccccccnaaacccccccccgggntttttttnaaaaaccccnnntttccccccnggggtttttttttttgnnggaaaanccncccnannctgggggnatttttnnggnccnnggnnncccnannggnaaaaaaaccngngnnnacncccc

SEQ ID NO: 12 - DNA, 256 bp, Homo Sapiens
tagagaaattactatgagaggatcgcatcaccatcaccatcacggatcctatttaggtgacactatagaatcgtcgacccacgcgtccgcccacgcgtccgcggacgcgtgggcagaacaggatggggacagcagcaagaccatcgagatcagcgacatgaagtaccacatttttcagatgatgatgcagtatctgtactacggaggaacagaatccatggagatccccaccactgacatcctggagctgctgtca

SEQ ID NO: 13 - DNA, 1301 bp, Homo Sapiens
  misc_feature (7)..(8): n is a, c, g, or t
  misc_feature (10)..(10): n is a, c, g, or t
  misc_feature (12)..(12): n is a, c, g, or t
  misc_feature (681)..(681): n is a, c, g, or t
  misc_feature (758)..(758): n is a, c, g, or t
  misc_feature (761)..(761): n is a, c, g, or t
  misc_feature (828)..(828): n is a, c, g, or t
  misc_feature (830)..(830): n is a, c, g, or t
  misc_feature (835)..(835): n is a, c, g, or t
  misc_feature (843)..(843): n is a, c, g, or t
  misc_feature (847)..(847): n is a, c, g, or t
  misc_feature (850)..(850): n is a, c, g, or t
  misc_feature (855)..(855): n is a, c, g, or t
  misc_feature (862)..(862): n is a, c, g, or t
  misc_feature (872)..(872): n is a, c, g, or t
  misc_feature (877)..(880): n is a, c, g, or t
  misc_feature (884)..(884): n is a, c, g, or t
  misc_feature (886)..(886): n is a, c, g, or t
  misc_feature (890)..(893): n is a, c, g, or t
  misc_feature (895)..(898): n is a, c, g, or t
  misc_feature (900)..(902): n is a, c, g, or t
  misc_feature (905)..(906): n is a, c, g, or t
  misc_feature (908)..(909): n is a, c, g, or t
  misc_feature (914)..(914): n is a, c, g, or t
  misc_feature (916)..(922): n is a, c, g, or t
  misc_feature (924)..(924): n is a, c, g, or t
  misc_feature (926)..(928): n is a, c, g, or t
  misc_feature (931)..(931): n is a, c, g, or t
  misc_feature (933)..(934): n is a, c, g, or t
  misc_feature (937)..(939): n is a, c, g, or t
  misc_feature (942)..(948): n is a, c, g, or t
  misc_feature (950)..(954): n is a, c, g, or t
  misc_feature (956)..(956): n is a, c, g, or t
  misc_feature (960)..(962): n is a, c, g, or t
  misc_feature (964)..(964): n is a, c, g, or t
  misc_feature (966)..(967): n is a, c, g, or t
  misc_feature (969)..(970): n is a, c, g, or t
  misc_feature (973)..(973): n is a, c, g, or t
  misc_feature (977)..(981): n is a, c, g, or t
  misc_feature (983)..(984): n is a, c, g, or t
  misc_feature (986)..(993): n is a, c, g, or t
  misc_feature (998)..(998): n is a, c, g, or t
  misc_feature (1002)..(1002): n is a, c, g, or t
  misc_feature (1004)..(1004): n is a, c, g, or t
  misc_feature (1006)..(1006): n is a, c, g, or t
  misc_feature (1010)..(1011): n is a, c, g, or t
  misc_feature (1013)..(1014): n is a, c, g, or t
  misc_feature (1016)..(1018): n is a, c, g, or t
  misc_feature (1020)..(1020): n is a, c, g, or t
  misc_feature (1023)..(1029): n is a, c, g, or t
  misc_feature (1031)..(1041): n is a, c, g, or t
  misc_feature (1044)..(1054): n is a, c, g, or t
  misc_feature (1056)..(1057): n is a, c, g, or t
  misc_feature (1061)..(1064): n is a, c, g, or t
  misc_feature (1067)..(1071): n is a, c, g, or t
  misc_feature (1074)..(1085): n is a, c, g, or t
  misc_feature (1087)..(1094): n is a, c, g, or t
  misc_feature (1097)..(1104): n is a, c, g, or t
  misc_feature (1106)..(1110): n is a, c, g, or t
  misc_feature (1112)..(1118): n is a, c, g, or t
  misc_feature (1122)..(1148): n is a, c, g, or t
  misc_feature (1151)..(1151): n is a, c, g, or t
  misc_feature (1155)..(1164): n is a, c, g, or t
  misc_feature (1168)..(1170): n is a, c, g, or t
  misc_feature (1174)..(1185): n is a, c, g, or t
  misc_feature (1187)..(1294): n is a, c, g, or t
  misc_feature (1296)..(1301): n is a, c, g, or t
tcccccnncnantagagaaattactatgaagaggatcgcatcaccatcaccatcacggatcctatttaggtgacactatagaatcgtcgacccacgcgtccgacggaaacaataacaataacggcaatgggtacacctacacagcggggggagaagcctcagtgccatcccccgacggctgccccgagctgcagcccacttttgacccggctcccgctcccccacctggggcaccacttatctgggcccagttcgagcggtccccgggaggcggacctgcagctccggtatcttcttcctgctcttcttctgcatcttcgtctgcttcttcctcctccgtggtcttccccgggggtggcgccagtgcgccctccaacgccaacctggggctattggtgcaccgccggctgcaccctggcaccagctgcccgcgcctgtctccacccttgcacatggccccgggggcgggagagcaccacctggctcgccgggtgcgcagcgacccgggtggaggaggcctggcctacgccgcttatgccaacgggctgggggcacagctgcctggcttgcagccgtcggacacgtcgggctcctcctcttcgtccagctcctcctccagctcttcatcctcttcctccgggcttcggcgtaaaggcagccgcgactgctccgtgtgcttcnagagcgaagtgattgccgcgctggtgccctgtggccacaacctcttctgcatggagtgcgccaatcgcatctgtganaanagcgagcccgagtgcccggtctgccacaccgcggtcactcaggccatccgcatcttttcttaaaggnancgggngctgctantgcncancgtgntgggggnaagggggaanccctnnnnatcntntttnnnnannnntnnntgnntnntgggngnnnnnnntntnnnttntnnttnnnggnnnnnnnannnnntnaatnnnanannanntgnaaannnnnannannnnnnnnttttnaaantnantttnnannannnanttnnnnnnnannnnnnnnnnnaannnnnnnnnnngnnaaannnnaannnnnaannnnnnnnnnnnannnnnnnnaannnnnnnntnnnnnannnnnnntttnnnnnnnnnnnnnnnnnnnnnnnnnnnaanaaannnnnnnnnntttnnntttnnnnnnnnnnnnannnnnnnnnnnnnnnnnnnnnnnnnnnnnnnnnnnnnnnnnnnnnnnnnnnnnnnnnnnnnnnnnnnnnnnnnnnnnnnnnnnnnnnnnnnnnnnnnnnnnnnnnnnntnnnnnn

SEQ ID NO: 14 - DNA, 1200 bp, Homo Sapiens
  misc_feature (710)..(710): n is a, c, g, or t
  misc_feature (767)..(767): n is a, c, g, or t
  misc_feature (929)..(929): n is a, c, g, or t
  misc_feature (978)..(979): n is a, c, g, or t
  misc_feature (1000)..(1000): n is a, c, g, or t
  misc_feature (1027)..(1028): n is a, c, g, or t
  misc_feature (1034)..(1034): n is a, c, g, or t
  misc_feature (1041)..(1041): n is a, c, g, or t
  misc_feature (1044)..(1044): n is a, c, g, or t
  misc_feature (1065)..(1067): n is a, c, g, or t
  misc_feature (1091)..(1091): n is a, c, g, or t
  misc_feature (1110)..(1110): n is a, c, g, or t
  misc_feature (1115)..(1115): n is a, c, g, or t
  misc_feature (1122)..(1122): n is a, c, g, or t
  misc_feature (1124)..(1124): n is a, c, g, or t
  misc_feature (1129)..(1129): n is a, c, g, or t
  misc_feature (1134)..(1134): n is a, c, g, or t
  misc_feature (1147)..(1147): n is a, c, g, or t
  misc_feature (1152)..(1152): n is a, c, g, or t
  misc_feature (1163)..(1163): n is a, c, g, or t
  misc_feature (1174)..(1174): n is a, c, g, or t
  misc_feature (1186)..(1186): n is a, c, g, or t
  misc_feature (1193)..(1193): n is a, c, g, or t
  misc_feature (1199)..(1199): n is a, c, g, or t
tagagagaattactatgagaggatcgcatcaccatcaccatcacggatcctatttaggtgacactatagaatcgtcgacccacgcgtccgccctgtcctccagtggtgaaagctgggagactctgccggggaaagaagagcgggaacctccacaggctaaggtgagtgccagcactggcaccagccctggccccggtgctagtgccagtgccggggctggcgccggggccagtgctggcagcaatggcagcaattaccttgaagaagttcgagaaccatctcttcaggaagagcaggcatccctggaagaaggagaaattccttggctccagtaccatgagaatgacagtagcagtgagggggataatgattctggtcacgagttgatgcaacctggggtattcatgctggatggaaacaacaaccttgaagatgactccagtgtgagcgaagacctagaagtggattggagcctctttgatggatttgcagatgggttaggagtggctgaagccatttcctatgtggaccctcagttcctcacctacatggcacttgaagaacgcctggcccaggcaatggaaactgcccttgcgcacttggagtctctcgcagtggatgtagaggtggccaatccaccagcaagcaaggagagcattgacgctcttcccgagatcctggtcactgaagatcatggcgcagttggtcangagatgtgctgccccatctgctgtagcgaatatgtgaagggggaggtggcaactganctgccgtgccaccactatttccacaagcccgtgtgtgtccatctggcttcaaaagtcaggcacctgccccgtgtgccgctgcatgttccctccccccactctaaaaaaccaaggccgtttactcctggtctgaattattttccccatctgaaatcccccaanactgcaaggagccctctttgaaattaacaatgggaaataaaaccaatcnntccatttaaccctaaacctantgattcccccgggaatattttccaatnngaaaanagttgtngtntgaattgccttaaaaatccannnccctctttttaaggttaaaaaaanggaaaactaaacctttctnaatgncaacttngnaaatngcaanaaaaaaaaaaccnttttncaaccggaaanttaaatcccantttttttcctcnaaaaaanggaaang

SEQ ID NO: 15 - DNA, 1374 bp, Homo Sapiens
  misc_feature (730)..(730): n is a, c, g, or t
  misc_feature (747)..(747): n is a, c, g, or t
  misc_feature (751)..(751): n is a, c, g, or t
  misc_feature (754)..(754): n is a, c, g, or t
  misc_feature (758)..(758): n is a, c, g, or t
  misc_feature (761)..(761): n is a, c, g, or t
  misc_feature (764)..(764): n is a, c, g, or t
  misc_feature (778)..(778): n is a, c, g, or t
  misc_feature (783)..(783): n is a, c, g, or t
  misc_feature (787)..(787): n is a, c, g, or t
  misc_feature (794)..(794): n is a, c, g, or t
  misc_feature (802)..(802): n is a, c, g, or t
  misc_feature (805)..(805): n is a, c, g, or t
  misc_feature (835)..(835): n is a, c, g, or t
  misc_feature (837)..(837): n is a, c, g, or t
  misc_feature (845)..(845): n is a, c, g, or t
  misc_feature (848)..(850): n is a, c, g, or t
  misc_feature (859)..(859): n is a, c, g, or t
  misc_feature (863)..(866): n is a, c, g, or t
  misc_feature (875)..(875): n is a, c, g, or t
  misc_feature (880)..(883): n is a, c, g, or t
  misc_feature (885)..(885): n is a, c, g, or t
  misc_feature (888)..(888): n is a, c, g, or t
  misc_feature (890)..(890): n is a, c, g, or t
  misc_feature (894)..(896): n is a, c, g, or t
  misc_feature (902)..(902): n is a, c, g, or t
  misc_feature (904)..(904): n is a, c, g, or t
  misc_feature (906)..(906): n is a, c, g, or t
  misc_feature (914)..(915): n is a, c, g, or t
  misc_feature (917)..(918): n is a, c, g, or t
  misc_feature (921)..(921): n is a, c, g, or t
  misc_feature (923)..(928): n is a, c, g, or t
  misc_feature (931)..(935): n is a, c, g, or t
  misc_feature (938)..(939): n is a, c, g, or t
  misc_feature (942)..(942): n is a, c, g, or t
  misc_feature (945)..(947): n is a, c, g, or t
  misc_feature (949)..(949): n is a, c, g, or t
  misc_feature (953)..(954): n is a, c, g, or t
  misc_feature (956)..(956): n is a, c, g, or t
  misc_feature (961)..(961): n is a, c, g, or t
  misc_feature (963)..(963): n is a, c, g, or t
  misc_feature (971)..(973): n is a, c, g, or t
  misc_feature (977)..(977): n is a, c, g, or t
  misc_feature (982)..(983): n is a, c, g, or t
  misc_feature (985)..(986): n is a, c, g, or t
  misc_feature (989)..(990): n is a, c, g, or t
  misc_feature (994)..(995): n is a, c, g, or t
  misc_feature (997)..(997): n is a, c, g, or t
  misc_feature (1001)..(1006): n is a, c, g, or t
  misc_feature (1008)..(1008): n is a, c, g, or t
  misc_feature (1010)..(1011): n is a, c, g, or t
  misc_feature (1015)..(1015): n is a, c, g, or t
  misc_feature (1020)..(1020): n is a, c, g, or t
  misc_feature (1024)..(1024): n is a, c, g, or t
  misc_feature (1027)..(1027): n is a, c, g, or t
  misc_feature (1032)..(1034): n is a, c, g, or t
  misc_feature (1038)..(1039): n is a, c, g, or t
  misc_feature (1041)..(1041): n is a, c, g, or t
  misc_feature (1044)..(1045): n is a, c, g, or t
  misc_feature (1047)..(1048): n is a, c, g, or t
  misc_feature (1051)..(1051): n is a, c, g, or t
  misc_feature (1053)..(1053): n is a, c, g, or t
  misc_feature (1055)..(1055): n is a, c, g, or t
  misc_feature (1059)..(1059): n is a, c, g, or t
  misc_feature (1063)..(1069): n is a, c, g, or t
  misc_feature (1075)..(1076): n is a, c, g, or t
  misc_feature (1080)..(1080): n is a, c, g, or t
  misc_feature (1082)..(1083): n is a, c, g, or t
  misc_feature (1086)..(1086): n is a, c, g, or t
  misc_feature (1088)..(1108): n is a, c, g, or t
  misc_feature (1110)..(1111): n is a, c, g, or t
  misc_feature (1113)..(1116): n is a, c, g, or t
  misc_feature (1119)..(1119): n is a, c, g, or t
  misc_feature (1121)..(1124): n is a, c, g, or t
  misc_feature (1126)..(1127): n is a, c, g, or t
  misc_feature (1129)..(1132): n is a, c, g, or t
  misc_feature (1134)..(1135): n is a, c, g, or t
  misc_feature (1137)..(1138): n is a, c, g, or t
  misc_feature (1141)..(1144): n is a, c, g, or t
  misc_feature (1146)..(1149): n is a, c, g, or t
  misc_feature (1157)..(1157): n is a, c, g, or t
  misc_feature (1162)..(1163): n is a, c, g, or t
  misc_feature (1165)..(1165): n is a, c, g, or t
  misc_feature (1167)..(1171): n is a, c, g, or t
  misc_feature (1175)..(1176): n is a, c, g, or t
  misc_feature (1178)..(1194): n is a, c, g, or t
  misc_feature (1196)..(1199): n is a, c, g, or t
  misc_feature (1201)..(1205): n is a, c, g, or t
  misc_feature (1207)..(1209): n is a, c, g, or t
  misc_feature (1213)..(1215): n is a, c, g, or t
  misc_feature (1217)..(1228): n is a, c, g, or t
  misc_feature (1230)..(1249): n is a, c, g, or t
  misc_feature (1252)..(1290): n is a, c, g, or t
  misc_feature (1292)..(1332): n is a, c, g, or t
  misc_feature (1334)..(1372): n is a, c, g, or t
tagagaaattactatggagaggatcgcatcaccattcaccatcacggatcctatttaggtgacactatagaatcgtcgacccacgcgtccgcccacgcgtccgagcaccgccccctggacgagcgggccctgcaggagaagctgaagtactttcccgtgtgcgtgagcaccaagccggagcccgaggacgatgcagaagagggacttgggggtcttcccagcaacatcagctctgtcagctccttgctgctcttcaacaccactgagaacctgtacaagaagtatgtcttcctggaccccctggctggtgctgtaacaaagacccatgtgatgctgggggcagagacagaggagaagctgtttgatgcccccttgtccatcagcaagagagagcagctggaacagcaggtcccagagaactacttctatgtgccagacctgggccaggtgcctgagattgatgttccgtcctacctgcctgacctgcccggcattgccaacgacctcatgtacagtgccgacctgggccccggcattgccccctctgcccctggcaccattccggaactgcccaccttccacactgaggtagccgagccactcaaggcagacctacaagatggggtactaacagcaccaccaccacccccaccgcccccaccacctcccccagctcctgaggtgctggccagtgcatccccactcccaccctcaaccgcggcccctgtangccaaggcgccaggcangacnacngcancancancgcgtctccttcantccangganctcccanggaagtgntcnacccctccggtggccgggccactctgctanantccatccnccnnnctggggggnatcnnnnaaggccaanctgcnnnncntgnangaannnaaactngnanaaaaaaanncnnaangnnnnnngannnnntgnnaanccnnnanccanngnggggnanttgatgtnnnaatntcttnnannaannttgnncntgannnnnnangnnattnttggnaaanganctggnnntggnnanggnncnnaanancntttncccnnnnnnnaaatcnnttcntnnttncnnnnnnnnnnnnnnnnnnnnnannannnnaanannnngnnannnnanngnnttnnnnannnnttttcccnaaacnnantnnnnntttnntnnnnnnnnnnnnnnnnnannnntnnnnnannnttcnnngnnnnnnnnnnnnannnnnnnnnnnnnnnnnnnnttnnnnnnnnnnnnnnnnnnnnnnnnnnnnnnnnnnnnnnntnnnnnnnnnnnnnnnnnnnnnnnnnnnnnnnnnnnnnnnnntnnnnnnnnnnnnnnnnnnnnnnnnnnnnnnnnnnnnnnnaa

SEQ ID NO: 16 - DNA, 1200 bp, Homo Sapiens
  misc_feature (967)..(967): n is a, c, g, or t
  misc_feature (987)..(987): n is a, c, g, or t
  misc_feature (998)..(998): n is a, c, g, or t
  misc_feature (1016)..(1016): n is a, c, g, or t
  misc_feature (1041)..(1041): n is a, c, g, or t
  misc_feature (1044)..(1044): n is a, c, g, or t
  misc_feature (1050)..(1051): n is a, c, g, or t
  misc_feature (1066)..(1066): n is a, c, g, or t
  misc_feature (1068)..(1068): n is a, c, g, or t
  misc_feature (1071)..(1071): n is a, c, g, or t
  misc_feature (1074)..(1074): n is a, c, g, or t
  misc_feature (1079)..(1079): n is a, c, g, or t
  misc_feature (1081)..(1081): n is a, c, g, or t
  misc_feature (1086)..(1086): n is a, c, g, or t
  misc_feature (1095)..(1095): n is a, c, g, or t
  misc_feature (1097)..(1097): n is a, c, g, or t
  misc_feature (1099)..(1099): n is a, c, g, or t
  misc_feature (1110)..(1110): n is a, c, g, or t
  misc_feature (1118)..(1118): n is a, c, g, or t
  misc_feature (1120)..(1120): n is a, c, g, or t
  misc_feature (1129)..(1129): n is a, c, g, or t
  misc_feature (1133)..(1133): n is a, c, g, or t
  misc_feature (1135)..(1135): n is a, c, g, or t
  misc_feature (1137)..(1137): n is a, c, g, or t
  misc_feature (1139)..(1139): n is a, c, g, or t
  misc_feature (1143)..(1143): n is a, c, g, or t
  misc_feature (1153)..(1153): n is a, c, g, or t
  misc_feature (1164)..(1164): n is a, c, g, or t
  misc_feature (1167)..(1168): n is a, c, g, or t
  misc_feature (1191)..(1191): n is a, c, g, or t
  misc_feature (1194)..(1194): n is a, c, g, or t
  misc_feature (1199)..(1199): n is a, c, g, or t
attagagagaattactatgagaggatcgcatcaccatcaccatcacggatcctatttaggtgacactatagaatcgtcgacccacgcgtccgctgaatttcttgtctcagaggcagaagtgagaaaagaaactgaaacaaaaaaggattctgaagaaatgttgaaagcaaagaagagagtttttccattgagtccagcgtcaaatctgagagtgcagcctaagaggaaggccagcatgccccacatggtgcagagtaaaaaggtgaacttgtgccgcccctttcccaaaagaactgcttccagagcagacaacagctcggactctccaacaactcttaagttagttaaaggacagtttcctcagaaaagaaaaagaggtgcggaagtgctgactgcacagtttgtacagaaaaccaaattggataggaaaaaccaagaagctcctatttctaaagatgttccagtgccaacaaatgctaaaagggcaaggaaacaagagaaatctccagtcaaaactgttccaagggctaagccacctgtgaagaaatctccacaaaaacagagagtaaatatagtaaaaggcaatgagaaccccagaaacagaaagcagctacaacctgtcaaaggagaaactgcttcaaagcttcaatcagaaatttcaagaggtggtcaagaagatgggattagcataaatagtgttcaaccagaaaataccacagcggctcacaatgatcttcctgaaaactccatcgtcaactatgactcccaggccctaaatatgttagccgatctagcattaagctctgctacttcttccacaccagtatctgaggctagaaatcttcactgttcctctgaattgccacaaaatgatgttttgctctctaaagaaaattctttgcgaggtacatctgaccctgaatatcatagaggagttaaactcaaaaggtgaattactacctaaccntcttctgataggaagagtanttctggatcanacttaactgttacccaanatgaaaaaagcttggttccttgtantcnggcccnngctaaagcccagtcngnccnttnctggngnaatgnctaaaatcntncnaatgcaagccnaagcctcntntgttttttngggnanantntttntgccccggcnccttacgaaanttnnaaaaaactctcccggggaaaaanaanctaanc

SEQ ID NO: 17 - DNA, 1200 bp, Homo Sapiens
  misc_feature (5)..(5): n is a, c, g, or t
  misc_feature (12)..(12): n is a, c, g, or t
  misc_feature (109)..(109): n is a, c, g, or t
  misc_feature (114)..(114): n is a, c, g, or t
  misc_feature (143)..(143): n is a, c, g, or t
  misc_feature (213)..(213): n is a, c, g, or t
  misc_feature (311)..(311): n is a, c, g, or t
  misc_feature (337)..(337): n is a, c, g, or t
  misc_feature (405)..(405): n is a, c, g, or t
  misc_feature (457)..(457): n is a, c, g, or t
  misc_feature (466)..(466): n is a, c, g, or t
  misc_feature (493)..(493): n is a, c, g, or t
  misc_feature (629)..(629): n is a, c, g, or t
  misc_feature (658)..(658): n is a, c, g, or t
  misc_feature (666)..(666): n is a, c, g, or t
  misc_feature (668)..(668): n is a, c, g, or t
  misc_feature (670)..(670): n is a, c, g, or t
  misc_feature (674)..(675): n is a, c, g, or t
  misc_feature (678)..(678): n is a, c, g, or t
  misc_feature (684)..(684): n is a, c, g, or t
  misc_feature (690)..(690): n is a, c, g, or t
  misc_feature (699)..(701): n is a, c, g, or t
  misc_feature (704)..(704): n is a, c, g, or t
  misc_feature (710)..(710): n is a, c, g, or t
  misc_feature (716)..(716): n is a, c, g, or t
  misc_feature (719)..(719): n is a, c, g, or t
  misc_feature (725)..(725): n is a, c, g, or t
  misc_feature (727)..(727): n is a, c, g, or t
  misc_feature (729)..(730): n is a, c, g, or t
  misc_feature (738)..(738): n is a, c, g, or t
  misc_feature (741)..(741): n is a, c, g, or t
  misc_feature (751)..(752): n is a, c, g, or t
  misc_feature (758)..(758): n is a, c, g, or t
  misc_feature (760)..(760): n is a, c, g, or t
  misc_feature (771)..(771): n is a, c, g, or t
  misc_feature (773)..(774): n is a, c, g, or t
  misc_feature (776)..(776): n is a, c, g, or t
  misc_feature (778)..(778): n is a, c, g, or t
  misc_feature (784)..(784): n is a, c, g, or t
  misc_feature (804)..(804): n is a, c, g, or t
  misc_feature (806)..(806): n is a, c, g, or t
  misc_feature (810)..(810): n is a, c, g, or t
  misc_feature (833)..(833): n is a, c, g, or t
  misc_feature (835)..(836): n is a, c, g, or t
  misc_feature (841)..(841): n is a, c, g, or t
  misc_feature (844)..(844): n is a, c, g, or t
  misc_feature (846)..(846): n is a, c, g, or t
  misc_feature (848)..(848): n is a, c, g, or t
  misc_feature (850)..(850): n is a, c, g, or t
  misc_feature (853)..(853): n is a, c, g, or t
  misc_feature (857)..(857): n is a, c, g, or t
  misc_feature (859)..(859): n is a, c, g, or t
  misc_feature (868)..(868): n is a, c, g, or t
  misc_feature (873)..(873): n is a, c, g, or t
  misc_feature (876)..(877): n is a, c, g, or t
  misc_feature (882)..(882): n is a, c, g, or t
  misc_feature (885)..(885): n is a, c, g, or t
  misc_feature (889)..(889): n is a, c, g, or t
  misc_feature (892)..(892): n is a, c, g, or t
  misc_feature (904)..(905): n is a, c, g, or t
  misc_feature (908)..(908): n is a, c, g, or t
  misc_feature (919)..(919): n is a, c, g, or t
  misc_feature (927)..(927): n is a, c, g, or t
  misc_feature (929)..(929): n is a, c, g, or t
  misc_feature (931)..(931): n is a, c, g, or t
  misc_feature (938)..(938): n is a, c, g, or t
  misc_feature (941)..(941): n is a, c, g, or t
  misc_feature (948)..(948): n is a, c, g, or t
  misc_feature (951)..(952): n is a, c, g, or t
  misc_feature (958)..(958): n is a, c, g, or t
  misc_feature (960)..(960): n is a, c, g, or t
  misc_feature (963)..(963): n is a, c, g, or t
  misc_feature (965)..(965): n is a, c, g, or t
  misc_feature (967)..(969): n is a, c, g, or t
  misc_feature (975)..(975): n is a, c, g, or t
  misc_feature (979)..(979): n is a, c, g, or t
  misc_feature (981)..(981): n is a, c, g, or t
  misc_feature (983)..(983): n is a, c, g, or t
  misc_feature (987)..(987): n is a, c, g, or t
  misc_feature (998)..(998): n is a, c, g, or t
  misc_feature (1000)..(1000): n is a, c, g, or t
  misc_feature (1010)..(1010): n is a, c, g, or t
  misc_feature (1012)..(1012): n is a, c, g, or t
  misc_feature (1014)..(1014): n is a, c, g, or t
  misc_feature (1016)..(1016): n is a, c, g, or t
  misc_feature (1018)..(1018): n is a, c, g, or t
  misc_feature (1022)..(1024): n is a, c, g, or t
  misc_feature (1027)..(1027): n is a, c, g, or t
  misc_feature (1031)..(1033): n is a, c, g, or t
  misc_feature (1042)..(1043): n is a, c, g, or t
  misc_feature (1049)..(1049): n is a, c, g, or t
  misc_feature (1055)..(1055): n is a, c, g, or t
  misc_feature (1057)..(1057): n is a, c, g, or t
  misc_feature (1060)..(1060): n is a, c, g, or t
  misc_feature (1064)..(1064): n is a, c, g, or t
  misc_feature (1070)..(1071): n is a, c, g, or t
  misc_feature (1074)..(1074): n is a, c, g, or t
  misc_feature (1090)..(1090): n is a, c, g, or t
  misc_feature (1096)..(1096): n is a, c, g, or t
  misc_feature (1100)..(1100): n is a, c, g, or t
  misc_feature (1103)..(1103): n is a, c, g, or t
  misc_feature (1109)..(1109): n is a, c, g, or t
  misc_feature (1118)..(1118): n is a, c, g, or t
  misc_feature (1121)..(1122): n is a, c, g, or t
  misc_feature (1126)..(1127): n is a, c, g, or t
  misc_feature (1129)..(1129): n is a, c, g, or t
  misc_feature (1133)..(1133): n is a, c, g, or t
  misc_feature (1135)..(1136): n is a, c, g, or t
  misc_feature (1142)..(1142): n is a, c, g, or t
  misc_feature (1146)..(1146): n is a, c, g, or t
  misc_feature (1158)..(1158): n is a, c, g, or t
  misc_feature (1160)..(1160): n is a, c, g, or t
  misc_feature (1163)..(1164): n is a, c, g, or t
  misc_feature (1172)..(1172): n is a, c, g, or t
  misc_feature (1174)..(1174): n is a, c, g, or t
  misc_feature (1176)..(1176): n is a, c, g, or t
  misc_feature (1180)..(1180): n is a, c, g, or t
  misc_feature (1191)..(1191): n is a, c, g, or t
  misc_feature (1193)..(1193): n is a, c, g, or t
  misc_feature (1197)..(1197): n is a, c, g, or t
  misc_feature (1200)..(1200): n is a, c, g, or t
gcatnccgcccncgcgtccgcgggagcggagagcggaccccagagagccctgagcagccccaccgccgccgccggcctagttaccatcacaccccgggaggagccgcanctgcngcagccggccccagtcaccatcaccgcanccatgagcagcgaggccgagacccagcagccgcccgccgccccccccgccgcccccgccctcagcgccgncgacaccaagcccggcactacgggcagcggcgcatggagcggtggcccgggcggcctcacatcggcggcgcctgccggcggggacaagaaggtcatcncaacgaaggttttgggaacagtaaantggttcaatgtaaggaacggatatggtttcatcaacaggaatgacaccaaggaagatgtatttgtacnccaagactgccataaatgaagaataaccccaggaagtaccttcgcagtgtangagatgganagactgtggagtttgatgttgttgaangagaaaagggtgcggaggcagcaaaatgttacaggtcctggtggtgttccagttcaaggcaagtaaatatgctgcagaccgtaaccattatagacgctatccacgtcgtaggggtcctctcacgcaaattaccagnaaaattaccacaataatgagagtgggganaaaaaccnangnatcnntanagttgntcccgnaaggccaannnccnaacaangccggnccntatcgnangnngaaggttnccnaccttactanntgcggnanaccctttgggncnncnancccagntattccaaacccttcttgtngnaagnaaaaattgatcgaagggttgctnannaccanggntncngnaanaacnangtttaaccnctganggnnaaatnttnttcnggnaataataaaccnncanttccgcagggntccctccncncnaaaaaanccntataaanacnngcaatngntananannnataaantttngnantaanacccttggttngntccccccttnantntngnaccnnncantttnnnttttcgttnntaaacnctcagnanacntaantcctcnnatngttaaaaagaaatagnacccancccncanataaanttctccccnccnnagtnnanatgncnngtctanaaanccccttaaaatntnttnnttcgtttntncntccncacaaaaaaananttcnccn

SEQ ID NO: 18 - DNA, 1220 bp, Homo Sapiens
  misc_feature (882)..(882): n is a, c, g, or t
  misc_feature (947)..(947): n is a, c, g, or t
  misc_feature (962)..(962): n is a, c, g, or t
  misc_feature (969)..(969): n is a, c, g, or t
  misc_feature (977)..(977): n is a, c, g, or t
  misc_feature (981)..(981): n is a, c, g, or t
  misc_feature (1005)..(1005): n is a, c, g, or t
  misc_feature (1008)..(1008): n is a, c, g, or t
  misc_feature (1010)..(1010): n is a, c, g, or t
  misc_feature (1026)..(1026): n is a, c, g, or t
  misc_feature (1053)..(1053): n is a, c, g, or t
  misc_feature (1058)..(1058): n is a, c, g, or t
  misc_feature (1079)..(1079): n is a, c, g, or t
  misc_feature (1085)..(1085): n is a, c, g, or t
  misc_feature (1091)..(1091): n is a, c, g, or t
  misc_feature (1107)..(1107): n is a, c, g, or t
  misc_feature (1111)..(1111): n is a, c, g, or t
  misc_feature (1125)..(1125): n is a, c, g, or t
  misc_feature (1129)..(1129): n is a, c, g, or t
  misc_feature (1135)..(1135): n is a, c, g, or t
  misc_feature (1144)..(1144): n is a, c, g, or t
  misc_feature (1146)..(1147): n is a, c, g, or t
  misc_feature (1163)..(1163): n is a, c, g, or t
  misc_feature (1172)..(1172): n is a, c, g, or t
  misc_feature (1175)..(1175): n is a, c, g, or t
  misc_feature (1180)..(1180): n is a, c, g, or t
  misc_feature (1195)..(1195): n is a, c, g, or t
  misc_feature (1199)..(1200): n is a, c, g, or t
  misc_feature (1206)..(1206): n is a, c, g, or t
  misc_feature (1212)..(1212): n is a, c, g, or t
  misc_feature (1214)..(1214): n is a, c, g, or t
  misc_feature (1218)..(1219): n is a, c, g, or t
tagagaaattactatgagaggatcgcatcaccatcaccatcacggatcctatttaggtgacactatagaatcgtcgacccacgcgtccgggcagaaatgggatcagaaatcacagaaaccccgagactcttcagttgaagttcgtagtgattgggaagtgaaagaggaaatggattttcctcagttgatgaagatgcgctacttggaagtatcagagccacaggacattgagtgttgtggggccctagaatactacgacaaagcctttgaccgcatcaccacgaggagtgagaagccactgcggagcatcaagcgcatcttccacactgtcaccaccacagacgaccctgtcatccgcaagctggcaaaaactcaggggaatgtgtttgccactgatgccatcctggccacgctgatgagctgtacccgctcagtgtattcctgggatattgtcgtccagagagttgggtccaaactcttctttgacaagagagacaactctgactttgcgctgcgcacattgtcagtgactctttgttgcatggtgagtgaccatgccacgcttttgcagacctcctgacagtgagtgagactgccaatgagccccctcaagatgaaggtaattccttcaattcaccccgcaacctggccatggaggcaacctacatcaaccacaatttctcccagcagtgcttgagaatggggaaggaaagatacaacttccccaacccaaacccgtttgtggaggacgacatggataagaatgaaatcgcctctgttgcgtaccgttaccgcaggtggaagcttggagatgatattgaccttattgtccgttgtgagcacgatggcgtcatgactggagccaacggggaaagtgtcctncatcaacatcaagacactcaatgagtgggattccaggccactgtaatggcgttgactggcgtcanaagctggactctcancgagggnctgtcatngccncggagctgaagaacacagctacanttngnccgggggacctgctgngctttgctggctggatctgaatacctnagctnggttatggtcccggtacccgngaaaantcctcngcccgtctcctagggncccngcagttcaggctantganttgccncccaatcancnngagcgggaaaaggccngggcatttnccngcccnttactcgcctgaacngggnnggcaancctctncncagnnc

SEQ ID NO: 19 - DNA, 256 bp, Homo Sapiens
ggccgcctgcagctgttcggccaggacttcagccacgcggcccgcagcgcccccgacggcgtgcccttcatcgtcaagaagtgcgtctgcgagatcgagcggcgggcgctgcgcaccaagggcatctaccgggtcaatggggtaaagacacgcgtggagaagctgtgccaggccttcgagaacggcaaggagctggtcgagctgtcgcaggcctcgccccacgacatcagcaacgtcctcaagctctacctgcgtc

SEQ ID NO: 20 - DNA, 256 bp, Homo Sapiens
aagcgggcgaggagcagcccatggagacgacgggcgccaccgagaacggacatgaggccgtccccgaaggcgagtcgccggccggggctggcacgggcgccgcggcgggggctggaggcgcgaccgcggcgcccccgagcgggaatcagaacggcgccgagggcgaccagatcaacgccagcaagaacgaggaggacgcgggaaaaatgttcgttggtggcctgagctgggatactagcaaaaaagatttaaaaga

SEQ ID NO: 21 - DNA, 1248 bp, Homo Sapiens
  misc_feature (2)..(2): n is a, c, g, or t
  misc_feature (7)..(7): n is a, c, g, or t
  misc_feature (12)..(12): n is a, c, g, or t
  misc_feature (66)..(66): n is a, c, g, or t
  misc_feature (83)..(83): n is a, c, g, or t
  misc_feature (95)..(95): n is a, c, g, or t
  misc_feature (113)..(113): n is a, c, g, or t
  misc_feature (127)..(127): n is a, c, g, or t
  misc_feature (154)..(155): n is a, c, g, or t
  misc_feature (197)..(197): n is a, c, g, or t
  misc_feature (250)..(250): n is a, c, g, or t
  misc_feature (260)..(260): n is a, c, g, or t
  misc_feature (269)..(269): n is a, c, g, or t
  misc_feature (283)..(283): n is a, c, g, or t
  misc_feature (285)..(285): n is a, c, g, or t
  misc_feature (291)..(291): n is a, c, g, or t
  misc_feature (340)..(340): n is a, c, g, or t
  misc_feature (384)..(384): n is a, c, g, or t
  misc_feature (386)..(386): n is a, c, g, or t
  misc_feature (389)..(390): n is a, c, g, or t
  misc_feature (412)..(413): n is a, c, g, or t
  misc_feature (437)..(437): n is a, c, g, or t
  misc_feature (446)..(446): n is a, c, g, or t
  misc_feature (448)..(448): n is a, c, g, or t
  misc_feature (461)..(461): n is a, c, g, or t
  misc_feature (476)..(476): n is a, c, g, or t
  misc_feature (479)..(479): n is a, c, g, or t
  misc_feature (489)..(489): n is a, c, g, or t
  misc_feature (493)..(494): n is a, c, g, or t
  misc_feature (500)..(500): n is a, c, g, or t
  misc_feature (503)..(504): n is a, c, g, or t
  misc_feature (518)..(518): n is a, c, g, or t
  misc_feature (521)..(521): n is a, c, g, or t
  misc_feature (533)..(533): n is a, c, g, or t
  misc_feature (544)..(544): n is a, c, g, or t
  misc_feature (548)..(548): n is a, c, g, or t
  misc_feature (550)..(551): n is a, c, g, or t
  misc_feature (557)..(557): n is a, c, g, or t
  misc_feature (564)..(564): n is a, c, g, or t
  misc_feature (568)..(569): n is a, c, g, or t
  misc_feature (571)..(572): n is a, c, g, or t
  misc_feature (574)..(574): n is a, c, g, or t
  misc_feature (578)..(578): n is a, c, g, or t
  misc_feature (581)..(581): n is a, c, g, or t
  misc_feature (596)..(596): n is a, c, g, or t
  misc_feature (598)..(599): n is a, c, g, or t
  misc_feature (610)..(610): n is a, c, g, or t
  misc_feature (618)..(619): n is a, c, g, or t
  misc_feature (623)..(623): n is a, c, g, or t
  misc_feature (625)..(625): n is a, c, g, or t
  misc_feature (631)..(632): n is a, c, g, or t
  misc_feature (634)..(634): n is a, c, g, or t
  misc_feature (637)..(638): n is a, c, g, or t
  misc_feature (644)..(644): n is a, c, g, or t
  misc_feature (647)..(647): n is a, c, g, or t
  misc_feature (651)..(651): n is a, c, g, or t
  misc_feature (656)..(656): n is a, c, g, or t
  misc_feature (659)..(659): n is a, c, g, or t
  misc_feature (662)..(662): n is a, c, g, or t
  misc_feature (668)..(668): n is a, c, g, or t
  misc_feature (670)..(670): n is a, c, g, or t
  misc_feature (681)..(681): n is a, c, g, or t
  misc_feature (690)..(690): n is a, c, g, or t
  misc_feature (692)..(692): n is a, c, g, or t
  misc_feature (694)..(694): n is a, c, g, or t
  misc_feature (699)..(700): n is a, c, g, or t
  misc_feature (717)..(718): n is a, c, g, or t
  misc_feature (725)..(727): n is a, c, g, or t
  misc_feature (730)..(731): n is a, c, g, or t
  misc_feature (733)..(733): n is a, c, g, or t
  misc_feature (736)..(736): n is a, c, g, or t
  misc_feature (741)..(742): n is a, c, g, or t
  misc_feature (744)..(744): n is a, c, g, or t
  misc_feature (746)..(746): n is a, c, g, or t
  misc_feature (751)..(751): n is a, c, g, or t
  misc_feature (755)..(755): n is a, c, g, or t
  misc_feature (760)..(760): n is a, c, g, or t
  misc_feature (762)..(762): n is a, c, g, or t
  misc_feature (766)..(768): n is a, c, g, or t
  misc_feature (776)..(776): n is a, c, g, or t
  misc_feature (779)..(779): n is a, c, g, or t
  misc_feature (784)..(787): n is a, c, g, or t
  misc_feature (789)..(789): n is a, c, g, or t
  misc_feature (796)..(799): n is a, c, g, or t
  misc_feature (802)..(802): n is a, c, g, or t
  misc_feature (810)..(811): n is a, c, g, or t
  misc_feature (813)..(815): n is a, c, g, or t
  misc_feature (817)..(817): n is a, c, g, or t
  misc_feature (819)..(820): n is a, c, g, or t
  misc_feature (823)..(824): n is a, c, g, or t
  misc_feature (827)..(827): n is a, c, g, or t
  misc_feature (829)..(831): n is a, c, g, or t
  misc_feature (843)..(843): n is a, c, g, or t
  misc_feature (845)..(846): n is a, c, g, or t
  misc_feature (848)..(849): n is a, c, g, or t
  misc_feature (851)..(852): n is a, c, g, or t
  misc_feature (854)..(855): n is a, c, g, or t
  misc_feature (861)..(861): n is a, c, g, or t
  misc_feature (863)..(863): n is a, c, g, or t
  misc_feature (866)..(866): n is a, c, g, or t
  misc_feature (869)..(870): n is a, c, g, or t
  misc_feature (872)..(872): n is a, c, g, or t
  misc_feature (881)..(881): n is a, c, g, or t
  misc_feature (883)..(883): n is a, c, g, or t
  misc_feature (887)..(888): n is a, c, g, or t
  misc_feature (899)..(899): n is a, c, g, or t
  misc_feature (905)..(905): n is a, c, g, or t
  misc_feature (909)..(909): n is a, c, g, or t
  misc_feature (913)..(913): n is a, c, g, or t
  misc_feature (916)..(917): n is a, c, g, or t
  misc_feature (922)..(924): n is a, c, g, or t
  misc_feature (926)..(926): n is a, c, g, or t
  misc_feature (932)..(932): n is a, c, g, or t
  misc_feature (936)..(937): n is a, c, g, or t
  misc_feature (940)..(940): n is a, c, g, or t
  misc_feature (943)..(943): n is a, c, g, or t
  misc_feature (946)..(946): n is a, c, g, or t
  misc_feature (949)..(949): n is a, c, g, or t
  misc_feature (951)..(952): n is a, c, g, or t
  misc_feature (956)..(956): n is a, c, g, or t
  misc_feature (958)..(960): n is a, c, g, or t
  misc_feature (964)..(964): n is a, c, g, or t
  misc_feature (975)..(975): n is a, c, g, or t
  misc_feature (985)..(985): n is a, c, g, or t
  misc_feature (989)..(989): n is a, c, g, or t
  misc_feature (994)..(995): n is a, c, g, or t
  misc_feature (1001)..(1001): n is a, c, g, or t
  misc_feature (1003)..(1005): n is a, c, g, or t
  misc_feature (1012)..(1013): n is a, c, g, or t
  misc_feature (1016)..(1016): n is a, c, g, or t
  misc_feature (1018)..(1018): n is a, c, g, or t
  misc_feature (1021)..(1021): n is a, c, g, or t
  misc_feature (1029)..(1029): n is a, c, g, or t
  misc_feature (1031)..(1032): n is a, c, g, or t
  misc_feature (1037)..(1037): n is a, c, g, or t
  misc_feature (1039)..(1040): n is a, c, g, or t
  misc_feature (1042)..(1042): n is a, c, g, or t
  misc_feature (1044)..(1045): n is a, c, g, or t
  misc_feature (1049)..(1051): n is a, c, g, or t
  misc_feature (1061)..(1062): n is a, c, g, or t
  misc_feature (1066)..(1067): n is a, c, g, or t
  misc_feature (1071)..(1071): n is a, c, g, or t
  misc_feature (1075)..(1075): n is a, c, g, or t
  misc_feature (1077)..(1077): n is a, c, g, or t
  misc_feature (1080)..(1080): n is a, c, g, or t
  misc_feature (1083)..(1083): n is a, c, g, or t
  misc_feature (1087)..(1087): n is a, c, g, or t
  misc_feature (1090)..(1090): n is a, c, g, or t
  misc_feature (1092)..(1093): n is a, c, g, or t
  misc_feature (1099)..(1099): n is a, c, g, or t
  misc_feature (1101)..(1102): n is a, c, g, or t
  misc_feature (1104)..(1104): n is a, c, g, or t
  misc_feature (1109)..(1109): n is a, c, g, or t
  misc_feature (1111)..(1112): n is a, c, g, or t
  misc_feature (1120)..(1122): n is a, c, g, or t
  misc_feature (1124)..(1124): n is a, c, g, or t
  misc_feature (1128)..(1129): n is a, c, g, or t
  misc_feature (1132)..(1132): n is a, c, g, or t
  misc_feature (1138)..(1138): n is a, c, g, or t
  misc_feature (1141)..(1141): n is a, c, g, or t
  misc_feature (1143)..(1143): n is a, c, g, or t
  misc_feature (1145)..(1148): n is a, c, g, or t
  misc_feature (1154)..(1154): n is a, c, g, or t
  misc_feature (1161)..(1162): n is a, c, g, or t
  misc_feature (1165)..(1166): n is a, c, g, or t
  misc_feature (1171)..(1171): n is a, c, g, or t
  misc_feature (1178)..(1179): n is a, c, g, or t
  misc_feature (1182)..(1184): n is a, c, g, or t
  misc_feature (1191)..(1191): n is a, c, g, or t
  misc_feature (1193)..(1194): n is a, c, g, or t
  misc_feature (1200)..(1200): n is a, c, g, or t
  misc_feature (1202)..(1202): n is a, c, g, or t
  misc_feature (1209)..(1209): n is a, c, g, or t
  misc_feature (1212)..(1213): n is a, c, g, or t
  misc_feature (1215)..(1215): n is a, c, g, or t
  misc_feature (1217)..(1217): n is a, c, g, or t
  misc_feature (1224)..(1225): n is a, c, g, or t
  misc_feature (1228)..(1228): n is a, c, g, or t
  misc_feature (1232)..(1234): n is a, c, g, or t
  misc_feature (1237)..(1238): n is a, c, g, or t
gnaaccngcctnctcggggcgcattccagcccttccagcctgcgacctcgcggaaaaaaaaaattncttattttcttgccccntacataccttgnggcgagcaaaaaaattanattttaaccatganggaaatcgtgcacatccaggctggtcnntgtggcagaccagatcggtgccaagttctgggaggtgatcantgatgaaaatggcatcgaccccaccggcacctaccacggggacagcgacctgnagctggaccncatctctgngtactacaatgaancnactggnggcaaatatgttcctcgtgccatcctgttggatctagaacctgggaccntggactctgttcgctcaagtccttttggccaccatctttagacnanacnnctttgtatttggtcagtctggnncaggtaacatctgggccaaaggcnactacacananggcgccaagctgnttgattctgtcctgncangtggtacgcnaatnnaggcanagnncctgtgactgcctncangacttccaaacngaaccactcantggncnngggcanaggctcngganngnncnactntcnttatcagcaagatcngnnaagaatttccnttgaatcnnaatnangcaatnncnttnngtgatngtncccntcacnccnaantgtctnancaccgtgattnggagccctntnantgtcnncccctcttccccccttnnctttggnnnaanncntantgaannanancctanttgnaattnanatannnatgccccnctnatgannnncngcctttnnnncanttttgaanncnnnancnntcnnaancnnnaggtggaatctnanncnncnntnntccttntntcnccnngnattgggtgncntccnncctgccctccntttttncctngtcntannttaannntnaacccncatnnccnttnggnagntnnaaantnnncccnttccccacgtnttcctttttnattnatgcnntggctntnnnccccttnntcntnccngggaaaancnnaacantnntntnnttannnaaattgcctnnatannctcnatcnangcnttncttntcnanngacttntnnanttccntnnctcccctnnntngtgnnaanaccttnccnangnnnncttccntcttggnnttnnatgtncttcacnnagnnnaatgccntnntctttnangtaaagnatnnantntctcctnnctnctgnnnatnncctccgctcc

SEQ ID NO: 22 - DNA, 1351 bp, Homo Sapiens
  misc_feature (897)..(897): n is a, c, g, or t
  misc_feature (900)..(900): n is a, c, g, or t
  misc_feature (914)..(914): n is a, c, g, or t
  misc_feature (929)..(929): n is a, c, g, or t
  misc_feature (944)..(944): n is a, c, g, or t
  misc_feature (948)..(948): n is a, c, g, or t
  misc_feature (965)..(965): n is a, c, g, or t
  misc_feature (973)..(973): n is a, c, g, or t
  misc_feature (977)..(977): n is a, c, g, or t
  misc_feature (982)..(982): n is a, c, g, or t
  misc_feature (985)..(985): n is a, c, g, or t
  misc_feature (987)..(987): n is a, c, g, or t
  misc_feature (1014)..(1015): n is a, c, g, or t
  misc_feature (1027)..(1027): n is a, c, g, or t
  misc_feature (1032)..(1032): n is a, c, g, or t
  misc_feature (1035)..(1035): n is a, c, g, or t
  misc_feature (1045)..(1045): n is a, c, g, or t
  misc_feature (1049)..(1049): n is a, c, g, or t
  misc_feature (1056)..(1056): n is a, c, g, or t
  misc_feature (1066)..(1066): n is a, c, g, or t
  misc_feature (1082)..(1082): n is a, c, g, or t
  misc_feature (1091)..(1091): n is a, c, g, or t
  misc_feature (1103)..(1104): n is a, c, g, or t
  misc_feature (1107)..(1107): n is a, c, g, or t
  misc_feature (1109)..(1109): n is a, c, g, or t
  misc_feature (1113)..(1113): n is a, c, g, or t
  misc_feature (1128)..(1129): n is a, c, g, or t
  misc_feature (1134)..(1134): n is a, c, g, or t
  misc_feature (1138)..(1140): n is a, c, g, or t
  misc_feature (1145)..(1145): n is a, c, g, or t
  misc_feature (1147)..(1147): n is a, c, g, or t
  misc_feature (1157)..(1160): n is a, c, g, or t
  misc_feature (1170)..(1170): n is a, c, g, or t
  misc_feature (1172)..(1175): n is a, c, g, or t
  misc_feature (1177)..(1178): n is a, c, g, or t
  misc_feature (1182)..(1183): n is a, c, g, or t
  misc_feature (1185)..(1185): n is a, c, g, or t
  misc_feature (1194)..(1196): n is a, c, g, or t
  misc_feature (1203)..(1203): n is a, c, g, or t
  misc_feature (1207)..(1207): n is a, c, g, or t
  misc_feature (1209)..(1210): n is a, c, g, or t
  misc_feature (1216)..(1216): n is a, c, g, or t
  misc_feature (1218)..(1218): n is a, c, g, or t
  misc_feature (1220)..(1224): n is a, c, g, or t
  misc_feature (1231)..(1231): n is a, c, g, or t
  misc_feature (1233)..(1233): n is a, c, g, or t
  misc_feature (1241)..(1242): n is a, c, g, or t
  misc_feature (1245)..(1247): n is a, c, g, or t
  misc_feature (1252)..(1253): n is a, c, g, or t
  misc_feature (1256)..(1256): n is a, c, g, or t
  misc_feature (1265)..(1265): n is a, c, g, or t
  misc_feature (1270)..(1270): n is a, c, g, or t
  misc_feature (1272)..(1272): n is a, c, g, or t
  misc_feature (1277)..(1277): n is a, c, g, or t
  misc_feature (1280)..(1281): n is a, c, g, or t
  misc_feature (1286)..(1286): n is a, c, g, or t
  misc_feature (1289)..(1292): n is a, c, g, or t
  misc_feature (1297)..(1303): n is a, c, g, or t
  misc_feature (1307)..(1309): n is a, c, g, or t
  misc_feature (1313)..(1313): n is a, c, g, or t
  misc_feature (1317)..(1317): n is a, c, g, or t
  misc_feature (1319)..(1320): n is a, c, g, or t
  misc_feature (1323)..(1325): n is a, c, g, or t
  misc_feature (1335)..(1335): n is a, c, g, or t
  misc_feature (1340)..(1340): n is a, c, g, or t
  misc_feature (1345)..(1345): n is a, c, g, or t
  misc_feature (1350)..(1351): n is a, c, g, or t
atagagaaattactatgagaggatcgcatcaccatcaccatcacggatcctatttaggtgacactatagaatcgtcgacccacgcgtccgccttcaggagccctgagcccaacatccatgagacaccccgagttgtgcttcatgagagttggattctctgcccactctttcagggatgtccaaggtccatgttagggggcaggcccccagctccactcactgcacaagcaccctaaatgttggaagcacaaaatggttgtgatttgagcacaatggcagggtcccgcaggcagacttgacaggcccaggcccgggaggatccccccacgttggctctgtccaaagtgagattgggggtgcctgtgtctgggacagggggctgcccttgctcagaccaggccttggctcatggcttgtcctaattctgggactcgtcatcttacttcttgcccttctgtgcccatcttaagactggaggctgagccttgtcaggcccagccacatctttacgccatgggaccaggagtaaagcgctctctaaaccccgcaccccaaatctctaaacgcctgagttcaggctgagtcctagccctagtgagcctgaagagcttggactgattcccagtctcctgggtcaagccccactttgtgctttcgaagcttatgagcgggttccctggatagaaggagtcttccatccccactgcccttgggcctcttcagcatagtcctgtgccagggccctgtcctcactatcagtcagttcagtatttgctttcacgtgagtggcggactcttctgaagcagccagaactctcaaagacagcgcatggagttgccttgcgagatttccaaggaaggaggaaagattaacaggcggagcctggcacacccaanccntttgaggtggtcanagtgccacctttcanccccttgggaaaggnacancgggtggggtctgggantggcctcncccntggantcnancctaaggaaatctctttcacccctcanntgttccagcccntgctnccntgtctggggnatgngtggccnggggcaaaanggcaattttaaagccnaaaaccccnttggggaaaaannaangntggnggggaattttcccannggccngaannnggggnanggaaaaaccnnnnagggggcttncnnnnanntttnngnaaaaaaaannnttttttncccngnnaaactncnannnnnggggggnancccccaannggnnntgggnnggnaaaagaaanccccngnttttnccnnggccnggnnnnttccnnnnnnntttnnngggnaaancnnccnnnaaaaaaaaanttttntcccnggggnn

SEQ ID NO: 23 - DNA, 256 bp, Homo Sapiens
tgagccgccggcgcgcttcgctgcctggcggcctttccccgagccgagcccgcttcccgaggccgccagtcgtcgcctgcccgcgcctgcgcagcgtcccgggccgagagggccacggcggcggccatggcgcaccgctgtttgcggctgtggggccggggcggctgctggccccgcggcctacagcagctcctcgtgcctggcggcgtgggcccgggcgagcagccctgcctccggacgctttaccgatttgtta

SEQ ID NO: 24 - DNA, 1324 bp, Homo Sapiens
  misc_feature (836)..(836): n is a, c, g, or t
  misc_feature (920)..(920): n is a, c, g, or t
  misc_feature (927)..(927): n is a, c, g, or t
  misc_feature (945)..(945): n is a, c, g, or t
  misc_feature (963)..(963): n is a, c, g, or t
  misc_feature (971)..(971): n is a, c, g, or t
  misc_feature (975)..(975): n is a, c, g, or t
  misc_feature (984)..(984): n is a, c, g, or t
  misc_feature (988)..(988): n is a, c, g, or t
  misc_feature (990)..(990): n is a, c, g, or t
  misc_feature (994)..(994): n is a, c, g, or t
  misc_feature (1001)..(1001): n is a, c, g, or t
  misc_feature (1006)..(1006): n is a, c, g, or t
  misc_feature (1008)..(1008): n is a, c, g, or t
  misc_feature (1012)..(1012): n is a, c, g, or t
  misc_feature (1014)..(1014): n is a, c, g, or t
  misc_feature (1017)..(1017): n is a, c, g, or t
  misc_feature (1034)..(1034): n is a, c, g, or t
  misc_feature (1063)..(1064): n is a, c, g, or t
  misc_feature (1073)..(1073): n is a, c, g, or t
  misc_feature (1076)..(1076): n is a, c, g, or t
  misc_feature (1079)..(1079): n is a, c, g, or t
  misc_feature (1087)..(1111): n is a, c, g, or t
  misc_feature (1114)..(1114): n is a, c, g, or t
  misc_feature (1118)..(1118): n is a, c, g, or t
  misc_feature (1122)..(1122): n is a, c, g, or t
  misc_feature (1125)..(1126): n is a, c, g, or t
  misc_feature (1137)..(1138): n is a, c, g, or t
  misc_feature (1140)..(1141): n is a, c, g, or t
  misc_feature (1143)..(1148): n is a, c, g, or t
  misc_feature (1152)..(1152): n is a, c, g, or t
  misc_feature (1156)..(1157): n is a, c, g, or t
  misc_feature (1160)..(1160): n is a, c, g, or t
  misc_feature (1162)..(1162): n is a, c, g, or t
  misc_feature (1164)..(1167): n is a, c, g, or t
  misc_feature (1171)..(1172): n is a, c, g, or t
  misc_feature (1175)..(1177): n is a, c, g, or t
  misc_feature (1180)..(1185): n is a, c, g, or t
  misc_feature (1187)..(1187): n is a, c, g, or t
  misc_feature (1190)..(1192): n is a, c, g, or t
  misc_feature (1195)..(1195): n is a, c, g, or t
  misc_feature (1197)..(1199): n is a, c, g, or t
  misc_feature (1209)..(1209): n is a, c, g, or t
  misc_feature (1211)..(1211): n is a, c, g, or t
  misc_feature (1218)..(1218): n is a, c, g, or t
  misc_feature (1222)..(1222): n is a, c, g, or t
  misc_feature (1230)..(1238): n is a, c, g, or t
  misc_feature (1244)..(1249): n is a, c, g, or t
  misc_feature (1253)..(1260): n is a, c, g, or t
  misc_feature (1263)..(1263): n is a, c, g, or t
  misc_feature (1265)..(1267): n is a, c, g, or t
  misc_feature (1269)..(1269): n is a, c, g, or t
  misc_feature (1273)..(1274): n is a, c, g, or t
  misc_feature (1276)..(1282): n is a, c, g, or t
  misc_feature (1285)..(1295): n is a, c, g, or t
  misc_feature (1298)..(1302): n is a, c, g, or t
  misc_feature (1307)..(1308): n is a, c, g, or t
  misc_feature (1313)..(1313): n is a, c, g, or t
  misc_feature (1316)..(1324): n is a, c, g, or t
tagagaaattactatgagaggatcgcatcaccatcaccatcacggatcctatttaggtgacactatagaatcgtcgacccacgcgtccgcgaaggagggggaggacgaggcaaagcggtatcaggagttccagaacagacaggtgcagagcctgctggagctgcgggaggcccaggtggacgcagaggcccagcggaggctggaacacctgagacaggctctgcagcggctcagggaggtcgtccttgatgcaaacacaactcagttcaagaggctgaaagagatgaacgagagggagaagaaggagctgcagaagatcctggacagaaagcgccataacagcatctcggaggccaagatgagggacaagcataagaaggaggcggaactgacggagattaaccgtcggcacatcactgagtcagtcaactccatccgtcggctggaggaggcccagaagcagcggcatgaccgtcttgtggctgggcagcagcaggtcctgcaacagctggcagaagaggagcccaagctgctggcccagctggcccaggagtgtcaggagcagcgggcgaggctcccccaggagatccgccggagcctgctgggcgagatgccggaggggctgggggacgggcctctggtggcctgtgccagcaacggtcacgcacccgggagcagcgggcacctgtcgggcgctgactcggagagccaggaggagaacacgcagctctgaactggctgagcgaggtggccacagggccagggcgggcgctgggtggagggcaggaggcaatgacactaatgctttttttttttttttttaactttttatctanaaattttatttttttaaacccggggcaagtacctcagctaactcccttcatcctcctggggcccctccttcctgccctcatctnaggttanggccttggtcaggctttnctccctgtgacccccacnccctcganctancacgtttcntccntncccnggaaaantggtngnaaantnganctccggaaatagaaccnattttttcccatccttggggatttttttnntgaaaaaantgnttncgggaaannnnnnnnnnnnnnnnnnnnnnnnnaangggncccnccnngggggcccccnnanntnnnnnnaaanttannccntnannnncccnnggnnnaannnnnncnttnnnccncnnnttttcccccncnttttttngggntttttttnnnnnnnnntttttnnnnnntttnnnnnnnnaanannngnaaanncnnnnnnnccnnnnnnnnnnnttnnnnnttttnnttttnttnnnnnnnnn

SEQ ID NO: 25 - DNA, 1341 bp, Homo Sapiens
  misc_feature (607)..(607): n is a, c, g, or t
  misc_feature (617)..(617): n is a, c, g, or t
  misc_feature (622)..(622): n is a, c, g, or t
  misc_feature (628)..(628): n is a, c, g, or t
  misc_feature (630)..(630): n is a, c, g, or t
  misc_feature (637)..(637): n is a, c, g, or t
  misc_feature (639)..(639): n is a, c, g, or t
  misc_feature (646)..(646): n is a, c, g, or t
  misc_feature (654)..(654): n is a, c, g, or t
  misc_feature (677)..(677): n is a, c, g, or t
  misc_feature (685)..(685): n is a, c, g, or t
  misc_feature (694)..(694): n is a, c, g, or t
  misc_feature (697)..(697): n is a, c, g, or t
  misc_feature (709)..(709): n is a, c, g, or t
  misc_feature (731)..(731): n is a, c, g, or t
  misc_feature (737)..(738): n is a, c, g, or t
  misc_feature (745)..(745): n is a, c, g, or t
  misc_feature (759)..(760): n is a, c, g, or t
  misc_feature (764)..(764): n is a, c, g, or t
  misc_feature (767)..(767): n is a, c, g, or t
  misc_feature (771)..(771): n is a, c, g, or t
  misc_feature (773)..(773): n is a, c, g, or t
  misc_feature (779)..(780): n is a, c, g, or t
  misc_feature (787)..(787): n is a, c, g, or t
  misc_feature (800)..(800): n is a, c, g, or t
  misc_feature (808)..(809): n is a, c, g, or t
  misc_feature (822)..(823): n is a, c, g, or t
  misc_feature (825)..(825): n is a, c, g, or t
  misc_feature (831)..(831): n is a, c, g, or t
  misc_feature (836)..(838): n is a, c, g, or t
  misc_feature (840)..(842): n is a, c, g, or t
  misc_feature (848)..(849): n is a, c, g, or t
  misc_feature (851)..(851): n is a, c, g, or t
  misc_feature (856)..(856): n is a, c, g, or t
  misc_feature (862)..(862): n is a, c, g, or t
  misc_feature (864)..(864): n is a, c, g, or t
  misc_feature (866)..(869): n is a, c, g, or t
  misc_feature (873)..(876): n is a, c, g, or t
  misc_feature (880)..(880): n is a, c, g, or t
  misc_feature (884)..(887): n is a, c, g, or t
  misc_feature (891)..(894): n is a, c, g, or t
  misc_feature (897)..(897): n is a, c, g, or t
  misc_feature (900)..(901): n is a, c, g, or t
  misc_feature (904)..(905): n is a, c, g, or t
  misc_feature (907)..(907): n is a, c, g, or t
  misc_feature (909)..(909): n is a, c, g, or t
  misc_feature (911)..(912): n is a, c, g, or t
  misc_feature (916)..(916): n is a, c, g, or t
  misc_feature (918)..(919): n is a, c, g, or t
  misc_feature (922)..(922): n is a, c, g, or t
  misc_feature (924)..(924): n is a, c, g, or t
  misc_feature (927)..(927): n is a, c, g, or t
  misc_feature (929)..(931): n is a, c, g, or t
  misc_feature (934)..(939): n is a, c, g, or t
  misc_feature (941)..(941): n is a, c, g, or t
  misc_feature (943)..(945): n is a, c, g, or t
  misc_feature (948)..(948): n is a, c, g, or t
  misc_feature (950)..(950): n is a, c, g, or t
  misc_feature (952)..(958): n is a, c, g, or t
  misc_feature (961)..(964): n is a, c, g, or t
  misc_feature (967)..(971): n is a, c, g, or t
  misc_feature (973)..(976): n is a, c, g, or t
  misc_feature (978)..(978): n is a, c, g, or t
  misc_feature (980)..(980): n is a, c, g, or t
  misc_feature (982)..(983): n is a, c, g, or t
  misc_feature (985)..(986): n is a, c, g, or t
  misc_feature (990)..(990): n is a, c, g, or t
  misc_feature (995)..(995): n is a, c, g, or t
  misc_feature (999)..(999): n is a, c, g, or t
  misc_feature (1001)..(1002): n is a, c, g, or t
  misc_feature (1005)..(1009): n is a, c, g, or t
  misc_feature (1011)..(1012): n is a, c, g, or t
  misc_feature (1015)..(1017): n is a, c, g, or t
  misc_feature (1019)..(1021): n is a, c, g, or t
  misc_feature (1028)..(1028): n is a, c, g, or t
  misc_feature (1034)..(1034): n is a, c, g, or t
  misc_feature (1039)..(1040): n is a, c, g, or t
  misc_feature (1045)..(1046): n is a, c, g, or t
  misc_feature (1049)..(1053): n is a, c, g, or t
  misc_feature (1065)..(1069): n is a, c, g, or t
  misc_feature (1071)..(1071): n is a, c, g, or t
  misc_feature (1075)..(1075): n is a, c, g, or t
  misc_feature (1078)..(1080): n is a, c, g, or t
  misc_feature (1082)..(1086): n is a, c, g, or t
  misc_feature (1088)..(1092): n is a, c, g, or t
  misc_feature (1101)..(1104): n is a, c, g, or t
  misc_feature (1109)..(1112): n is a, c, g, or t
  misc_feature (1116)..(1118): n is a, c, g, or t
  misc_feature (1120)..(1123): n is a, c, g, or t
  misc_feature (1127)..(1129): n is a, c, g, or t
  misc_feature (1131)..(1135): n is a, c, g, or t
  misc_feature (1138)..(1138): n is a, c, g, or t
  misc_feature (1140)..(1141): n is a, c, g, or t
  misc_feature (1146)..(1148): n is a, c, g, or t
  misc_feature (1150)..(1150): n is a, c, g, or t
  misc_feature (1155)..(1159): n is a, c, g, or t
  misc_feature (1162)..(1163): n is a, c, g, or t
  misc_feature (1165)..(1165): n is a, c, g, or t
  misc_feature (1167)..(1168): n is a, c, g, or t
  misc_feature (1170)..(1177): n is a, c, g, or t
  misc_feature (1179)..(1181): n is a, c, g, or t
  misc_feature (1185)..(1187): n is a, c, g, or t
  misc_feature (1192)..(1197): n is a, c, g, or t
  misc_feature (1199)..(1201): n is a, c, g, or t
  misc_feature (1204)..(1205): n is a, c, g, or t
  misc_feature (1207)..(1211): n is a, c, g, or t
  misc_feature (1213)..(1213): n is a, c, g, or t
  misc_feature (1215)..(1216): n is a, c, g, or t
  misc_feature (1221)..(1225): n is a, c, g, or t
  misc_feature (1227)..(1227): n is a, c, g, or t
  misc_feature (1229)..(1231): n is a, c, g, or t
  misc_feature (1233)..(1233): n is a, c, g, or t
  misc_feature (1236)..(1242): n is a, c, g, or t
  misc_feature (1244)..(1247): n is a, c, g, or t
  misc_feature (1250)..(1253): n is a, c, g, or t
  misc_feature (1257)..(1259): n is a, c, g, or t
  misc_feature (1261)..(1271): n is a, c, g, or t
  misc_feature (1273)..(1277): n is a, c, g, or t
  misc_feature (1279)..(1283): n is a, c, g, or t
  misc_feature (1285)..(1288): n is a, c, g, or t
  misc_feature (1290)..(1299): n is a, c, g, or t
  misc_feature (1301)..(1313): n is a, c, g, or t
  misc_feature (1316)..(1319): n is a, c, g, or t
  misc_feature (1321)..(1326): n is a, c, g, or t
  misc_feature (1329)..(1337): n is a, c, g, or t
  misc_feature (1340)..(1341): n is a, c, g, or t
tagagagattactatgagaggatcgcatcaccatcaccatcacggatcctatttaggtgacactatagaatcgtcgacccacgcgtccgcccacgcgatccgcccacgcgtccgcccacgcgtccgcccacgcgtccgcggacgcgtgggccgtgctgcagctgctgacctgccacctgcgtgggaccagtgaatgcacgcagctgagggcgctgtgtgccatcgcctccctggggagcagcgacctcctcccccaggagcacatcctcctccgcacccggccgtggctgcaggagctcagcatgggcagcccgggacctgtgaccaacaaggccaccaagatcctgaggcactttgaggcctcctgtgggcagctgtcccctgcccggggcacctcagctgagcctggccccacagccgccctcccaggcccatctgacctgctgaccgacgctgtgcctctccctgggagccaggtcttcctgcagcctctgagttcaaccccggtctcgtcccggagccctgctccctcatctgggatgccgtccagccctgtgcccaccccacccccagatgcctcccccattccagcccccggagaccccancgaggccgangccanactggnanaaagcangnggtgganacctgaanggatcccagggggcacggacagnccaaaganaggccccancanctgtgcgtgganccgcgactccttgtttgctggnatgganntggtggnctgtccccgcctgnntggnggntggngntgctgnngaaaaantctgtcctgattnttccccgnnccccccaaaaatnntnccaaangaaannnannnaaaaanntnttggntaaaancntnnnntttnnnnttcngaannnntgannnnaanggnntgnncntnanntttnannttnanttntnnntgnnnnnntntnnnttntnannnnnnnaannnnaannnnnannnntntnannanntttnatttnaaanannaannnnngnnttnnnannntttcccnattttnttttnnaaaannttnnnnnttttaaattaannnnnanaaanaannnannnnnannnnnttaaaaaannnnatttnnnntttnnngnnnnattnnntnnnnnttntnnaaaannnanttttnnnnnaannanannannnnnnnntnnntatnnnttttnnnnnntnnnttnnannnnntnannaaaannnnntntnnntnttnnnnnnnannnnaannnntttnnntnnnnnnnnnnntnnnnntnnnnntnnnntnnnnnnnnnnannnnnnnnnnnnnttnnnntnnnnnnatnnnnnnnnnttnn

SEQ ID NO: 26 - DNA, 1400 bp, Homo Sapiens
  misc_feature (1)..(2): n is a, c, g, or t
  misc_feature (4)..(4): n is a, c, g, or t
  misc_feature (888)..(888): n is a, c, g, or t
  misc_feature (890)..(890): n is a, c, g, or t
  misc_feature (928)..(928): n is a, c, g, or t
  misc_feature (931)..(931): n is a, c, g, or t
  misc_feature (949)..(949): n is a, c, g, or t
  misc_feature (954)..(954): n is a, c, g, or t
  misc_feature (965)..(965): n is a, c, g, or t
  misc_feature (983)..(983): n is a, c, g, or t
  misc_feature (999)..(999): n is a, c, g, or t
  misc_feature (1012)..(1012): n is a, c, g, or t
  misc_feature (1023)..(1023): n is a, c, g, or t
  misc_feature (1045)..(1045): n is a, c, g, or t
  misc_feature (1049)..(1049): n is a, c, g, or t
  misc_feature (1055)..(1055): n is a, c, g, or t
  misc_feature (1070)..(1070): n is a, c, g, or t
  misc_feature (1083)..(1083): n is a, c, g, or t
  misc_feature (1089)..(1089): n is a, c, g, or t
  misc_feature (1102)..(1102): n is a, c, g, or t
  misc_feature (1127)..(1141): n is a, c, g, or t
  misc_feature (1150)..(1150): n is a, c, g, or t
  misc_feature (1152)..(1152): n is a, c, g, or t
  misc_feature (1161)..(1161): n is a, c, g, or t
  misc_feature (1169)..(1169): n is a, c, g, or t
  misc_feature (1171)..(1173): n is a, c, g, or t
  misc_feature (1180)..(1180): n is a, c, g, or t
  misc_feature (1183)..(1183): n is a, c, g, or t
  misc_feature (1189)..(1189): n is a, c, g, or t
  misc_feature (1194)..(1196): n is a, c, g, or t
  misc_feature (1202)..(1202): n is a, c, g, or t
  misc_feature (1208)..(1208): n is a, c, g, or t
  misc_feature (1210)..(1211): n is a, c, g, or t
  misc_feature (1214)..(1214): n is a, c, g, or t
  misc_feature (1223)..(1223): n is a, c, g, or t
  misc_feature (1225)..(1225): n is a, c, g, or t
  misc_feature (1231)..(1231): n is a, c, g, or t
  misc_feature (1238)..(1238): n is a, c, g, or t
  misc_feature (1244)..(1245): n is a, c, g, or t
  misc_feature (1254)..(1254): n is a, c, g, or t
  misc_feature (1257)..(1257): n is a, c, g, or t
  misc_feature (1267)..(1268): n is a, c, g, or t
  misc_feature (1274)..(1274): n is a, c, g, or t
  misc_feature (1276)..(1278): n is a, c, g, or t
  misc_feature (1282)..(1282): n is a, c, g, or t
  misc_feature (1286)..(1286): n is a, c, g, or t
  misc_feature (1291)..(1291): n is a, c, g, or t
  misc_feature (1297)..(1299): n is a, c, g, or t
  misc_feature (1301)..(1302): n is a, c, g, or t
  misc_feature (1304)..(1305): n is a, c, g, or t
  misc_feature (1314)..(1314): n is a, c, g, or t
  misc_feature (1317)..(1317): n is a, c, g, or t
  misc_feature (1319)..(1320): n is a, c, g, or t
  misc_feature (1330)..(1330): n is a, c, g, or t
  misc_feature (1337)..(1337): n is a, c, g, or t
  misc_feature (1340)..(1340): n is a, c, g, or t
  misc_feature (1355)..(1357): n is a, c, g, or t
  misc_feature (1363)..(1363): n is a, c, g, or t
  misc_feature (1367)..(1368): n is a, c, g, or t
  misc_feature (1373)..(1375): n is a, c, g, or t
  misc_feature (1377)..(1377): n is a, c, g, or t
  misc_feature (1379)..(1381): n is a, c, g, or t
  misc_feature (1384)..(1384): n is a, c, g, or t
  misc_feature (1387)..(1387): n is a, c, g, or t
  misc_feature (1400)..(1400): n is a, c, g, or t
nnantagagaaattactatgagaggatcgcatcaccatcaccatcacggatcctatttaggtgacactatagaatcgtcgacccacgcgtccgcggacgcgtggggaggcggagcaggcgctgcggcaggagggaagatggcggacgaggagaagctgccgcccggctgggagaagcgcatgagccgcagctcaggccgagtgtactacttcaaccacatcactaacgccagccagtgggagcggcccagcggcaacagcagcagtggtggcaaaaacgggcagggggagcctgccagggtccgctgctcgcacctgctggtgaagcacagccagtcacggcggccctcgtcctggcggcaggagaagatcacccggaccaaggaggaggccctggagctgatcaacggctacatccagaagatcaagtcgggagaggaggactttgagtctctggcctcacagttcagcgactgcagctcagccaaggccaggggagacctgggtgccttcagcagaggtcagatgcagaagccatttgaagacgcctcgtttgcgctgcggacgggggagatgagcgggcccgtgttcacggattccggcatccacatcatcctccgcactgagtgagggtggggagcccaggcctggcctcggggcagggcagggcggctaggccggccagctcccccttgcccgccagccagtggccgaaccccccactccctgccaccgtcacacagtatttattgttcccacaatggctgggagggggcccttccagattgggggccctggggtccccactccctgtccatccccagttggggctgcgaccgccagattctcccttaaggaattgacttcagcaggggtgggaagctcccanancccaggggcagtgtggtgggaagggtgttccaaaaganaangcctggtcagcaaaaccnccccntgtccccccangtgctggaagcaaactcnaagggccgaattgttnctagttagccacnctcctttgttncattcccaaaggtgaaccctcntgcngcccancccttggcccttttnaacaacttttcancacccntttccccccaatnaaacccaaacccctggcaaaaaaannnnnnnnnnnnnnnaaaaaaggncnccccccccntaaggggncnnntaacttnatnactaanttggnnncctttnaaaatncnnaanacccccaantnctttgnttttttnaaaccnngtttccccnggntttttttggnnaaaccncnnntttngganttttngacttnnntnnannggaaaaaanctngnnatcccttatntcccggnccnaaaatttgggttttnnnttttgnaaannaattnnntntnnnttnaanaaaaaaaattttn

SEQ ID NO: 27 - DNA, 1448 bp, Homo Sapiens
  misc_feature (93)..(93): n is a, c, g, or t
  misc_feature (104)..(105): n is a, c, g, or t
  misc_feature (117)..(117): n is a, c, g, or t
  misc_feature (120)..(120): n is a, c, g, or t
  misc_feature (125)..(125): n is a, c, g, or t
  misc_feature (127)..(127): n is a, c, g, or t
  misc_feature (132)..(132): n is a, c, g, or t
  misc_feature (141)..(141): n is a, c, g, or t
  misc_feature (174)..(174): n is a, c, g, or t
  misc_feature (203)..(203): n is a, c, g, or t
  misc_feature (208)..(208): n is a, c, g, or t
  misc_feature (213)..(213): n is a, c, g, or t
  misc_feature (272)..(272): n is a, c, g, or t
  misc_feature (280)..(280): n is a, c, g, or t
  misc_feature (285)..(285): n is a, c, g, or t
  misc_feature (319)..(319): n is a, c, g, or t
  misc_feature (326)..(326): n is a, c, g, or t
  misc_feature (333)..(333): n is a, c, g, or t
  misc_feature (348)..(348): n is a, c, g, or t
  misc_feature (350)..(350): n is a, c, g, or t
  misc_feature (352)..(352): n is a, c, g, or t
  misc_feature (355)..(355): n is a, c, g, or t
  misc_feature (361)..(361): n is a, c, g, or t
  misc_feature (373)..(373): n is a, c, g, or t
  misc_feature (379)..(380): n is a, c, g, or t
  misc_feature (383)..(383): n is a, c, g, or t
  misc_feature (386)..(387): n is a, c, g, or t
  misc_feature (415)..(416): n is a, c, g, or t
  misc_feature (419)..(419): n is a, c, g, or t
  misc_feature (421)..(421): n is a, c, g, or t
  misc_feature (434)..(434): n is a, c, g, or t
  misc_feature (439)..(440): n is a, c, g, or t
  misc_feature (447)..(447): n is a, c, g, or t
  misc_feature (450)..(450): n is a, c, g, or t
  misc_feature (452)..(454): n is a, c, g, or t
  misc_feature (464)..(464): n is a, c, g, or t
  misc_feature (466)..(467): n is a, c, g, or t
  misc_feature (472)..(472): n is a, c, g, or t
  misc_feature (475)..(475): n is a, c, g, or t
  misc_feature (482)..(483): n is a, c, g, or t
  misc_feature (485)..(485): n is a, c, g, or t
  misc_feature (495)..(495): n is a, c, g, or t
  misc_feature (497)..(497): n is a, c, g, or t
  misc_feature (499)..(499): n is a, c, g, or t
  misc_feature (508)..(508): n is a, c, g, or t
  misc_feature (527)..(529): n is a, c, g, or t
  misc_feature (532)..(535): n is a, c, g, or t
  misc_feature (540)..(540): n is a, c, g, or t
  misc_feature (543)..(543): n is a, c, g, or t
  misc_feature (545)..(545): n is a, c, g, or t
  misc_feature (555)..(555): n is a, c, g, or t
  misc_feature (564)..(565): n is a, c, g, or t
  misc_feature (582)..(583): n is a, c, g, or t
  misc_feature (585)..(586): n is a, c, g, or t
  misc_feature (590)..(590): n is a, c, g, or t
  misc_feature (593)..(593): n is a, c, g, or t
  misc_feature (595)..(595): n is a, c, g, or t
  misc_feature (601)..(601): n is a, c, g, or t
  misc_feature (605)..(605): n is a, c, g, or t
  misc_feature (607)..(607): n is a, c, g, or t
  misc_feature (611)..(612): n is a, c, g, or t
  misc_feature (624)..(624): n is a, c, g, or t
  misc_feature (628)..(628): n is a, c, g, or t
  misc_feature (631)..(635): n is a, c, g, or t
  misc_feature (638)..(638): n is a, c, g, or t
  misc_feature (647)..(649): n is a, c, g, or t
  misc_feature (663)..(663): n is a, c, g, or t
  misc_feature (695)..(695): n is a, c, g, or t
  misc_feature (721)..(721): n is a, c, g, or t
  misc_feature (724)..(724): n is a, c, g, or t
  misc_feature (731)..(732): n is a, c, g, or t
  misc_feature (740)..(740): n is a, c, g, or t
  misc_feature (743)..(743): n is a, c, g, or t
  misc_feature (746)..(747): n is a, c, g, or t
  misc_feature (751)..(753): n is a, c, g, or t
  misc_feature (758)..(758): n is a, c, g, or t
  misc_feature (770)..(770): n is a, c, g, or t
  misc_feature (774)..(774): n is a, c, g, or t
  misc_feature (784)..(784): n is a, c, g, or t
  misc_feature (786)..(786): n is a, c, g, or t
  misc_feature (789)..(789): n is a, c, g, or t
  misc_feature (792)..(792): n is a, c, g, or t
  misc_feature (799)..(799): n is a, c, g, or t
  misc_feature (809)..(810): n is a, c, g, or t
  misc_feature (813)..(813): n is a, c, g, or t
  misc_feature (816)..(816): n is a, c, g, or t
  misc_feature (824)..(824): n is a, c, g, or t
  misc_feature (837)..(837): n is a, c, g, or t
  misc_feature (842)..(843): n is a, c, g, or t
  misc_feature (848)..(848): n is a, c, g, or t
  misc_feature (851)..(851): n is a, c, g, or t
  misc_feature (857)..(857): n is a, c, g, or t
  misc_feature (865)..(865): n is a, c, g, or t
  misc_feature (868)..(868): n is a, c, g, or t
  misc_feature (876)..(876): n is a, c, g, or t
  misc_feature (878)..(878): n is a, c, g, or t
  misc_feature (881)..(881): n is a, c, g, or t
  misc_feature (883)..(883): n is a, c, g, or t
  misc_feature (887)..(887): n is a, c, g, or t
  misc_feature (895)..(896): n is a, c, g, or t
  misc_feature (903)..(903): n is a, c, g, or t
  misc_feature (909)..(910): n is a, c, g, or t
  misc_feature (914)..(914): n is a, c, g, or t
  misc_feature (916)..(916): n is a, c, g, or t
  misc_feature (921)..(921): n is a, c, g, or t
  misc_feature (925)..(925): n is a, c, g, or t
  misc_feature (928)..(928): n is a, c, g, or t
  misc_feature (933)..(933): n is a, c, g, or t
  misc_feature (935)..(935): n is a, c, g, or t
  misc_feature (938)..(938): n is a, c, g, or t
  misc_feature (943)..(943): n is a, c, g, or t
  misc_feature (947)..(947): n is a, c, g, or t
  misc_feature (953)..(953): n is a, c, g, or t
  misc_feature (964)..(964): n is a, c, g, or t
  misc_feature (967)..(969): n is a, c, g, or t
  misc_feature (971)..(972): n is a, c, g, or t
  misc_feature (977)..(978): n is a, c, g, or t
  misc_feature (980)..(981): n is a, c, g, or t
  misc_feature (999)..(1000): n is a, c, g, or t
  misc_feature (1002)..(1002): n is a, c, g, or t
  misc_feature (1009)..(1010): n is a, c, g, or t
  misc_feature (1025)..(1025): n is a, c, g, or t
  misc_feature (1043)..(1043): n is a, c, g, or t
  misc_feature (1046)..(1046): n is a, c, g, or t
  misc_feature (1053)..(1053): n is a, c, g, or t
  misc_feature (1055)..(1056): n is a, c, g, or t
  misc_feature (1068)..(1068): n is a, c, g, or t
  misc_feature (1075)..(1075): n is a, c, g, or t
  misc_feature (1077)..(1077): n is a, c, g, or t
  misc_feature (1084)..(1084): n is a, c, g, or t
  misc_feature (1093)..(1093): n is a, c, g, or t
  misc_feature (1098)..(1099): n is a, c, g, or t
  misc_feature (1106)..(1106): n is a, c, g, or t
  misc_feature (1113)..(1113): n is a, c, g, or t
  misc_feature (1116)..(1117): n is a, c, g, or t
  misc_feature (1120)..(1120): n is a, c, g, or t
  misc_feature (1128)..(1128): n is a, c, g, or t
  misc_feature (1138)..(1138): n is a, c, g, or t
  misc_feature (1147)..(1147): n is a, c, g, or t
  misc_feature (1149)..(1149): n is a, c, g, or t
  misc_feature (1160)..(1160): n is a, c, g, or t
  misc_feature (1167)..(1167): n is a, c, g, or t
  misc_feature (1174)..(1175): n is a, c, g, or t
  misc_feature (1178)..(1178): n is a, c, g, or t
  misc_feature (1182)..(1182): n is a, c, g, or t
  misc_feature (1184)..(1185): n is a, c, g, or t
  misc_feature (1190)..(1190): n is a, c, g, or t
  misc_feature (1192)..(1193): n is a, c, g, or t
  misc_feature (1195)..(1195): n is a, c, g, or t
  misc_feature (1204)..(1204): n is a, c, g, or t
  misc_feature (1207)..(1207): n is a, c, g, or t
  misc_feature (1214)..(1214): n is a, c, g, or t
  misc_feature (1218)..(1219): n is a, c, g, or t
  misc_feature (1221)..(1221): n is a, c, g, or t
  misc_feature (1226)..(1226): n is a, c, g, or t
  misc_feature (1233)..(1233): n is a, c, g, or t
  misc_feature (1236)..(1236): n is a, c, g, or t
  misc_feature (1238)..(1238): n is a, c, g, or t
  misc_feature (1243)..(1243): n is a, c, g, or t
  misc_feature (1248)..(1248): n is a, c, g, or t
  misc_feature (1253)..(1254): n is a, c, g, or t
  misc_feature (1259)..(1259): n is a, c, g, or t
  misc_feature (1268)..(1268): n is a, c, g, or t
  misc_feature (1282)..(1283): n is a, c, g, or t
  misc_feature (1287)..(1287): n is a, c, g, or t
  misc_feature (1291)..(1292): n is a, c, g, or t
  misc_feature (1295)..(1295): n is a, c, g, or t
  misc_feature (1297)..(1297): n is a, c, g, or t
  misc_feature (1304)..(1304): n is a, c, g, or t
  misc_feature (1308)..(1311): n is a, c, g, or t
  misc_feature (1315)..(1315): n is a, c, g, or t
  misc_feature (1317)..(1317): n is a, c, g, or t
  misc_feature (1326)..(1326): n is a, c, g, or t
  misc_feature (1332)..(1335): n is a, c, g, or t
  misc_feature (1337)..(1337): n is a, c, g, or t
  misc_feature (1340)..(1348): n is a, c, g, or t
  misc_feature (1352)..(1354): n is a, c, g, or t
  misc_feature (1356)..(1357): n is a, c, g, or t
  misc_feature (1364)..(1365): n is a, c, g, or t
  misc_feature (1368)..(1370): n is a, c, g, or t
  misc_feature (1372)..(1377): n is a, c, g, or t
  misc_feature (1380)..(1383): n is a, c, g, or t
  misc_feature (1385)..(1385): n is a, c, g, or t
  misc_feature (1387)..(1388): n is a, c, g, or t
  misc_feature (1395)..(1395): n is a, c, g, or t
  misc_feature (1398)..(1400): n is a, c, g, or t
  misc_feature (1402)..(1403): n is a, c, g, or t
  misc_feature (1405)..(1409): n is a, c, g, or t
  misc_feature (1411)..(1413): n is a, c, g, or t
  misc_feature (1417)..(1418): n is a, c, g, or t
  misc_feature (1424)..(1425): n is a, c, g, or t
  misc_feature (1429)..(1430): n is a, c, g, or t
  misc_feature (1436)..(1437): n is a, c, g, or t
  misc_feature (1440)..(1440): n is a, c, g, or t
  misc_feature (1443)..(1443): n is a, c, g, or t
  misc_feature (1445)..(1448): n is a, c, g, or t
atagagaaattactatgagaggatcgcatcaccatcaccatcacggatcctatttaggtgacactatagaatcgtcgacccacgcgtccgganacacttggacnnattatggctganttnttggncnataanttgaccagnggagggatctgggtctgtgttacagagatgagnaggtccatgatcatccttggaacggaacnacccnaaatntctcgcctcttcataaacctgatgggtttataaccttaccacagttgggcaactggganaagatgtnactgncatccccttgtccctcccccgtatacctgtaggnagaaagntataacntccctgtctttcccngnanttnatgctnaggacagaaatnaaaatnnagngannctggaatagcactttcgatacccacatnntgngntccgtgaaggccngttcnntgaattnccnannnccttccaccnannacatngcntttgagnncnatggggatcncncncgtggggtntcttatttgaacttggacnnnggnnnntacangcncnccctgacatnctcccagannccttctctctatgtttnntnngtgnggncngaggantcancncctnnaaatactggtcncatngtnnnnnctnctaatttcnnnatgtcccaagtgcncaacatgcacctgctgtctcctgggcctattntgaactgcagatgctgtccacacacngancttgacnntgtgttanacnganntccnnnatgcnactatctcgtantcantgtgtcctcntntgnccngaataanacccgagatnntanttnagcagatnctctactatctcnttgcnnatggnttnctttgngagaaggnctnaaagcctntntanangaanaggctctnngaatgcnccagtnntcananaaaanagangcntttcntnctngatgntccnatttanggggatggctntcnnntnnaacanntnngggagttttactattaannanaatgacnnggaacaatgatttgnaaaacttctttggttccnccntgaaacnannttgaaaaccccncttttananacctggnacaaaaaancattnntgggaancccgggnaannccncttggggnaaaaaaaaanggccctttncngattttatttnggcgatnaaaagtnnggngggnanncccancnntnttttaaacnaanccccaantttnntnggggnaaaaaanggntnaaagnccccnaaatnncgggnccctccctnaaaaccttggattnnaaancctnnctntnccccctnagannnncctntntttggggantttttnnnntnaannnnnnnnnaaannncnnaaaattnnaannnannnnnntgnnnnanannccctctnccnnngnnannnnntnnnaaannattttnntttnnccaaannttnaantnnnn

SEQ ID NO: 28 - DNA, 1392 bp, Homo Sapiens
  misc_feature (826)..(826): n is a, c, g, or t
  misc_feature (852)..(852): n is a, c, g, or t
  misc_feature (854)..(854): n is a, c, g, or t
  misc_feature (877)..(877): n is a, c, g, or t
  misc_feature (880)..(880): n is a, c, g, or t
  misc_feature (901)..(901): n is a, c, g, or t
  misc_feature (948)..(948): n is a, c, g, or t
  misc_feature (974)..(974): n is a, c, g, or t
  misc_feature (986)..(986): n is a, c, g, or t
  misc_feature (997)..(997): n is a, c, g, or t
  misc_feature (1007)..(1007): n is a, c, g, or t
  misc_feature (1011)..(1011): n is a, c, g, or t
  misc_feature (1013)..(1013): n is a, c, g, or t
  misc_feature (1020)..(1020): n is a, c, g, or t
  misc_feature (1023)..(1023): n is a, c, g, or t
  misc_feature (1031)..(1031): n is a, c, g, or t
  misc_feature (1054)..(1054): n is a, c, g, or t
  misc_feature (1056)..(1056): n is a, c, g, or t
  misc_feature (1062)..(1062): n is a, c, g, or t
  misc_feature (1064)..(1065): n is a, c, g, or t
  misc_feature (1080)..(1081): n is a, c, g, or t
  misc_feature (1089)..(1089): n is a, c, g, or t
  misc_feature (1093)..(1093): n is a, c, g, or t
  misc_feature (1098)..(1099): n is a, c, g, or t
  misc_feature (1112)..(1113): n is a, c, g, or t
  misc_feature (1129)..(1129): n is a, c, g, or t
  misc_feature (1137)..(1137): n is a, c, g, or t
  misc_feature (1139)..(1139): n is a, c, g, or t
  misc_feature (1147)..(1147): n is a, c, g, or t
  misc_feature (1151)..(1151): n is a, c, g, or t
  misc_feature (1154)..(1154): n is a, c, g, or t
  misc_feature (1156)..(1156): n is a, c, g, or t
  misc_feature (1165)..(1165): n is a, c, g, or t
  misc_feature (1171)..(1171): n is a, c, g, or t
  misc_feature (1190)..(1190): n is a, c, g, or t
  misc_feature (1199)..(1199): n is a, c, g, or t
  misc_feature (1204)..(1205): n is a, c, g, or t
  misc_feature (1212)..(1213): n is a, c, g, or t
  misc_feature (1222)..(1222): n is a, c, g, or t
  misc_feature (1240)..(1241): n is a, c, g, or t
  misc_feature (1248)..(1248): n is a, c, g, or t
  misc_feature (1256)..(1256): n is a, c, g, or t
  misc_feature (1259)..(1259): n is a, c, g, or t
  misc_feature (1272)..(1273): n is a, c, g, or t
  misc_feature (1280)..(1280): n is a, c, g, or t
  misc_feature (1282)..(1283): n is a, c, g, or t
  misc_feature (1289)..(1291): n is a, c, g, or t
  misc_feature (1294)..(1295): n is a, c, g, or t
  misc_feature (1297)..(1300): n is a, c, g, or t
  misc_feature (1304)..(1316): n is a, c, g, or t
  misc_feature (1318)..(1322): n is a, c, g, or t
  misc_feature (1325)..(1325): n is a, c, g, or t
  misc_feature (1329)..(1331): n is a, c, g, or t
  misc_feature (1333)..(1337): n is a, c, g, or t
  misc_feature (1342)..(1342): n is a, c, g, or t
  misc_feature (1346)..(1348): n is a, c, g, or t
  misc_feature (1356)..(1358): n is a, c, g, or t
  misc_feature (1363)..(1364): n is a, c, g, or t
  misc_feature (1373)..(1373): n is a, c, g, or t
  misc_feature (1380)..(1381): n is a, c, g, or t
  misc_feature (1383)..(1383): n is a, c, g, or t
  misc_feature (1385)..(1386): n is a, c, g, or t
  misc_feature (1392)..(1392): n is a, c, g, or t
tagagaaattactatgagaggatcgcatcaccatcaccatcacggatcctatttaggtgacactatagaatcgtcgacccacgcgtccgcttcagcagcaagagcagcagctccagcaactccagcagctcctggcctccccgcagctgaccccggaacaccagactgttgtctaccagatgatccagcagatccagcagaaacgggagctgcagcgcctgcagatggctgggggctcccagctgcccatggccagcctgctggcaggaagctccaccccgctgctgtctgcgggtacccctggcctgctgcccacagcgtctgctccacccctgctgcccgctggagccctagtggctccctcgcttggcaacaacacaagtctcatggccgcagcagctgcagctgcagcagtagcagcagcaggcggacctccagtcctcactgcccagaccaaccccttcctcagcctgtcgggagcagagggcagtggcggtggccccaaaggagggaccgctgacaaaggagcctcagccaaccaggaaaaaggctaaatccacccttacccctcctgacccccccaagtggagggaacagatcctggcctgaggggtcctagcctggagcaggcgcctgcgcccagaccctggagagccttgacccagagcctgtgctgaggtccagggagtgtggagagctcctggtgtcgaggactgagactgagaggggagccccctccatctggcccccttccctttccgcactgtccgctttgtgaggctcagaggaaggacagtctgcaagcccgcctaggaggtccatcccnagcaaatgttttggaggtccccccananagcaaagtgggccatggcaaaantanggggttggttggacctgtcanatgaaaatggatcagcactttgaatgggaaaaattggaaggaaaagnccttggcctgtccctgcggggaaatnttttatggaaanaagggctggancccactttanctgnanttttttnccnacttgggnaaaatggaaaaaggaacccttgnantttttntnncatcccccccccagnnaaggggcnaaanttgannttttaaaaacccnnaaattttgggggctgnaaaagggnangaaaaaantaanttnancccagcctnttaaanttttgggccccttaaaggnaaaaaaggnaaggnngggaaanntttgccttntttgggcccccctttttnncaattgnaaataaangcnaaaggggaaaaannccccccnanntaaggnnngcnnannnngtgnnnnnnnnnnnnntnnnnnttncccnnnannnnnagggnaaannnttaaaaannnaaaannccctttttncccccanntntnngggggn

SEQ ID NO: 29 - DNA, 256 bp, Homo Sapiens
  misc_feature (7)..(7): n is a, c, g, or t
  misc_feature (23)..(24): n is a, c, g, or t
  misc_feature (82)..(82): n is a, c, g, or t
  misc_feature (100)..(100): n is a, c, g, or t
  misc_feature (122)..(122): n is a, c, g, or t
  misc_feature (124)..(124): n is a, c, g, or t
  misc_feature (139)..(139): n is a, c, g, or t
  misc_feature (145)..(145): n is a, c, g, or t
  misc_feature (152)..(153): n is a, c, g, or t
  misc_feature (176)..(177): n is a, c, g, or t
  misc_feature (182)..(182): n is a, c, g, or t
  misc_feature (189)..(189): n is a, c, g, or t
  misc_feature (195)..(195): n is a, c, g, or t
  misc_feature (201)..(201): n is a, c, g, or t
  misc_feature (207)..(207): n is a, c, g, or t
  misc_feature (212)..(213): n is a, c, g, or t
  misc_feature (216)..(216): n is a, c, g, or t
  misc_feature (219)..(219): n is a, c, g, or t
  misc_feature (224)..(224): n is a, c, g, or t
  misc_feature (230)..(231): n is a, c, g, or t
  misc_feature (242)..(242): n is a, c, g, or t
  misc_feature (249)..(249): n is a, c, g, or t
  misc_feature (253)..(253): n is a, c, g, or t
agctaanaagaaaaaacccgctnntgggggtgaaaaaacccaaaccatcaccatcacggatcctagggaggggacactatanaaacgccgacccacgcgnccgcccacgcgtccgagacggncncggaggcaccacctntgctgntcagcgnngaagaagagaaggaggcacaacnnggagngaagccngagganaaaaangaaganagtgnnttnttntcatnaaaagnngggagaacggngggggcngcgncag

SEQ ID NO: 30 - DNA, 256 bp, Homo Sapiens
ccacgcgtccgcccacgcgtccgcccacgcgtccgcgtggacagaggaagggcgccgggtctgtgttccgcgcgcacgtgaagcaccgtaaaggcgctgcgcgcctgcgcgccgtggatttcgctgagcggcacggctacatcaagggcatcgtcaaggacatcatccacgacccgggccgcggcgcgcccctcgccaaggtggtcttccgggatccgtatcggtttaagaagcggacggagctgttcattgccgc

SEQ ID NO: 31 - DNA, 1441 bp, Homo Sapiens
  misc_feature (823)..(823): n is a, c, g, or t
  misc_feature (861)..(861): n is a, c, g, or t
  misc_feature (893)..(893): n is a, c, g, or t
  misc_feature (939)..(939): n is a, c, g, or t
  misc_feature (945)..(945): n is a, c, g, or t
  misc_feature (947)..(947): n is a, c, g, or t
  misc_feature (949)..(949): n is a, c, g, or t
  misc_feature (966)..(966): n is a, c, g, or t
  misc_feature (973)..(973): n is a, c, g, or t
  misc_feature (979)..(979): n is a, c, g, or t
  misc_feature (983)..(984): n is a, c, g, or t
  misc_feature (991)..(991): n is a, c, g, or t
  misc_feature (1002)..(1002): n is a, c, g, or t
  misc_feature (1027)..(1028): n is a, c, g, or t
  misc_feature (1031)..(1031): n is a, c, g, or t
  misc_feature (1051)..(1051): n is a, c, g, or t
  misc_feature (1057)..(1057): n is a, c, g, or t
  misc_feature (1066)..(1066): n is a, c, g, or t
  misc_feature (1072)..(1072): n is a, c, g, or t
  misc_feature (1076)..(1076): n is a, c, g, or t
  misc_feature (1087)..(1087): n is a, c, g, or t
  misc_feature (1090)..(1090): n is a, c, g, or t
  misc_feature (1094)..(1094): n is a, c, g, or t
  misc_feature (1101)..(1101): n is a, c, g, or t
  misc_feature (1106)..(1106): n is a, c, g, or t
  misc_feature (1109)..(1109): n is a, c, g, or t
  misc_feature (1123)..(1123): n is a, c, g, or t
  misc_feature (1125)..(1126): n is a, c, g, or t
  misc_feature (1128)..(1128): n is a, c, g, or t
  misc_feature (1133)..(1133): n is a, c, g, or t
  misc_feature (1138)..(1138): n is a, c, g, or t
  misc_feature (1140)..(1141): n is a, c, g, or t
  misc_feature (1147)..(1147): n is a, c, g, or t
  misc_feature (1156)..(1156): n is a, c, g, or t
  misc_feature (1158)..(1158): n is a, c, g, or t
  misc_feature (1161)..(1161): n is a, c, g, or t
  misc_feature (1184)..(1184): n is a, c, g, or t
  misc_feature (1188)..(1188): n is a, c, g, or t
  misc_feature (1194)..(1194): n is a, c, g, or t
  misc_feature (1202)..(1202): n is a, c, g, or t
  misc_feature (1204)..(1204): n is a, c, g, or t
  misc_feature (1214)..(1214): n is a, c, g, or t
  misc_feature (1225)..(1226): n is a, c, g, or t
  misc_feature (1249)..(1249): n is a, c, g, or t
  misc_feature (1256)..(1256): n is a, c, g, or t
  misc_feature (1279)..(1280): n is a, c, g, or t
  misc_feature (1282)..(1282): n is a, c, g, or t
  misc_feature (1287)..(1287): n is a, c, g, or t
  misc_feature (1292)..(1294): n is a, c, g, or t
  misc_feature (1304)..(1304): n is a, c, g, or t
  misc_feature (1315)..(1316): n is a, c, g, or t
  misc_feature (1319)..(1320): n is a, c, g, or t
  misc_feature (1328)..(1330): n is a, c, g, or t
  misc_feature (1332)..(1332): n is a, c, g, or t
  misc_feature (1340)..(1340): n is a, c, g, or t
  misc_feature (1344)..(1344): n is a, c, g, or t
  misc_feature (1346)..(1347): n is a, c, g, or t
  misc_feature (1349)..(1350): n is a, c, g, or t
  misc_feature (1367)..(1367): n is a, c, g, or t
  misc_feature (1369)..(1369): n is a, c, g, or t
  misc_feature (1371)..(1371): n is a, c, g, or t
  misc_feature (1373)..(1373): n is a, c, g, or t
  misc_feature (1379)..(1379): n is a, c, g, or t
  misc_feature (1383)..(1383): n is a, c, g, or t
  misc_feature (1388)..(1388): n is a, c, g, or t
  misc_feature (1402)..(1403): n is a, c, g, or t
  misc_feature (1413)..(1413): n is a, c, g, or t
  misc_feature (1416)..(1416): n is a, c, g, or t
  misc_feature (1431)..(1431): n is a, c, g, or t
  misc_feature (1441)..(1441): n is a, c, g, or t
tagagagattactatgagaggatcgcatcaccatcaccatcacggatcctatttaggtgacactatagaatcgtcgacccacgcgtccgcccacgcgtccgaaccgccgccaggtcgctgttggtccacgccgcccgtcgcgccgcccgcccgctcagcgtccgccgccgccatgggagtgcaggtggaaaccatctccccaggagacgggcgcaccttccccaagcgcggccagacctgcgtggtgcactacaccgggatgcttgaagatggaaagaaatttgattcctcccgggacagaaacaagccctttaagtttatgctaggcaagcaggaggtgatccgaggctgggaagaaggggttgcccagatgagtgtgggtcagagagccaaactgactatatctccagattatgcctatggtgccactgggcacccaggcatcatcccaccacatgccactctcgtcttcgatgtggagcttctaaaactggaatgacaggaatggcctcctcccttagctccctgttcttggatctgccgtggagggatctggtgcctccagacatgtgcacatgagtccatatggagcttttcctgatgttccactccactttgtatagacatctgccctgactgaatgtgttctgtcactcagctttgcttccgacacctctgtttcctcttcccctttctcctcgtatgtgtgtttacctaaactatatgccataaacctcaagttactcattttattttgttttcattttggggtgaagattcagtttcagtcttttggatataggtttccaattaagtacatggntcaaagtattaacagcacaagtggtaagttaacattanaataggaattggtgtttgggggggggggtttngcaaagaaaaattttattttaatttttttggaaggaaatttttaanctaatnananattaaaacatttcttgnctgctgngctgcnaaannccataancaaaattttanggcccttgtttgaagaactgaaatnnctntcccaagtttgaaaaaaatntttttnggtttaaantaaaancccntaccttaaaantgnaggnggggaanggggnaanaaccttttgccttnannanttccnacccnannctcccntttaaaccntncgncttttaaaaaaaaattatgtttncttncaatgngggaaacntnaaggattttntccttgggccnncagggacctttgaaacctttttngtgggcnttttttttttccccggggttttnnanaggantttcnnnatttttaaanctcaaaatttnnaanncccctttnnnantttaaaanttantnnannttttttgagggggtttnanantnaacccngaanccccnccgaaaaactttannttttaaaaanagngtgcccccccccccnctcttttttn

SEQ ID NO: 32 - DNA, 256 bp, Homo Sapiens
ccatctgcggtggagccgccaccaaaatgcagattttcgtgaaaacccttacggggaagaccatcaccctcgaggttgaaccctcggatacgatagaaaatgtaaaggccaagatccaggataaggaaggaattcctcctgatcagcagagactgatctttgctggcaagcagctggaagatggacgtactttgtctgactacaatattcaaaaggagtctactcttcatcttgtgttgagacttcgtggtggtgc

SEQ ID NO: 33 - DNA, 1359 bp, Homo Sapiens
  misc_feature (600)..(600): n is a, c, g, or t
  misc_feature (670)..(670): n is a, c, g, or t
  misc_feature (680)..(680): n is a, c, g, or t
  misc_feature (687)..(687): n is a, c, g, or t
  misc_feature (689)..(689): n is a, c, g, or t
  misc_feature (695)..(695): n is a, c, g, or t
  misc_feature (730)..(730): n is a, c, g, or t
  misc_feature (740)..(740): n is a, c, g, or t
  misc_feature (762)..(762): n is a, c, g, or t
  misc_feature (768)..(768): n is a, c, g, or t
  misc_feature (770)..(770): n is a, c, g, or t
  misc_feature (776)..(776): n is a, c, g, or t
  misc_feature (779)..(779): n is a, c, g, or t
  misc_feature (794)..(794): n is a, c, g, or t
  misc_feature (802)..(802): n is a, c, g, or t
  misc_feature (818)..(818): n is a, c, g, or t
  misc_feature (826)..(826): n is a, c, g, or t
  misc_feature (829)..(829): n is a, c, g, or t
  misc_feature (838)..(839): n is a, c, g, or t
  misc_feature (850)..(850): n is a, c, g, or t
  misc_feature (854)..(854): n is a, c, g, or t
  misc_feature (857)..(857): n is a, c, g, or t
  misc_feature (864)..(864): n is a, c, g, or t
  misc_feature (867)..(867): n is a, c, g, or t
  misc_feature (871)..(871): n is a, c, g, or t
  misc_feature (875)..(877): n is a, c, g, or t
  misc_feature (880)..(881): n is a, c, g, or t
  misc_feature (884)..(884): n is a, c, g, or t
  misc_feature (889)..(889): n is a, c, g, or t
  misc_feature (891)..(891): n is a, c, g, or t
  misc_feature (893)..(893): n is a, c, g, or t
  misc_feature (903)..(904): n is a, c, g, or t
  misc_feature (908)..(908): n is a, c, g, or t
  misc_feature (910)..(910): n is a, c, g, or t
  misc_feature (916)..(916): n is a, c, g, or t
  misc_feature (919)..(919): n is a, c, g, or t
  misc_feature (921)..(921): n is a, c, g, or t
  misc_feature (925)..(927): n is a, c, g, or t
  misc_feature (930)..(930): n is a, c, g, or t
  misc_feature (934)..(934): n is a, c, g, or t
  misc_feature (937)..(937): n is a, c, g, or t
  misc_feature (939)..(940): n is a, c, g, or t
  misc_feature (945)..(945): n is a, c, g, or t
  misc_feature (953)..(955): n is a, c, g, or t
  misc_feature (957)..(957): n is a, c, g, or t
  misc_feature (960)..(962): n is a, c, g, or t
  misc_feature (964)..(965): n is a, c, g, or t
  misc_feature (968)..(968): n is a, c, g, or t
  misc_feature (972)..(972): n is a, c, g, or t
  misc_feature (974)..(974): n is a, c, g, or t
  misc_feature (976)..(977): n is a, c, g, or t
  misc_feature (979)..(979): n is a, c, g, or t
  misc_feature (982)..(982): n is a, c, g, or t
  misc_feature (984)..(984): n is a, c, g, or t
  misc_feature (988)..(988): n is a, c, g, or t
  misc_feature (1000)..(1001): n is a, c, g, or t
  misc_feature (1003)..(1005): n is a, c, g, or t
  misc_feature (1010)..(1010): n is a, c, g, or t
  misc_feature (1015)..(1017): n is a, c, g, or t
  misc_feature (1023)..(1028): n is a, c, g, or t
  misc_feature (1030)..(1037): n is a, c, g, or t
  misc_feature (1040)..(1040): n is a, c, g, or t
  misc_feature (1042)..(1044): n is a, c, g, or t
  misc_feature (1048)..(1050): n is a, c, g, or t
  misc_feature (1052)..(1052): n is a, c, g, or t
  misc_feature (1060)..(1062): n is a, c, g, or t
  misc_feature (1066)..(1066): n is a, c, g, or t
  misc_feature (1068)..(1068): n is a, c, g, or t
  misc_feature (1071)..(1074): n is a, c, g, or t
  misc_feature (1077)..(1078): n is a, c, g, or t
  misc_feature (1081)..(1084): n is a, c, g, or t
  misc_feature (1086)..(1086): n is a, c, g, or t
  misc_feature (1097)..(1102): n is a, c, g, or t
  misc_feature (1104)..(1104): n is a, c, g, or t
  misc_feature (1107)..(1107): n is a, c, g, or t
  misc_feature (1109)..(1109): n is a, c, g, or t
  misc_feature (1111)..(1113): n is a, c, g, or t
  misc_feature (1115)..(1121): n is a, c, g, or t
  misc_feature (1125)..(1126): n is a, c, g, or t
  misc_feature (1129)..(1129): n is a, c, g, or t
  misc_feature (1133)..(1134): n is a, c, g, or t
  misc_feature (1136)..(1138): n is a, c, g, or t
  misc_feature (1140)..(1154): n is a, c, g, or t
  misc_feature (1157)..(1158): n is a, c, g, or t
  misc_feature (1160)..(1170): n is a, c, g, or t
  misc_feature (1172)..(1172): n is a, c, g, or t
  misc_feature (1174)..(1182): n is a, c, g, or t
  misc_feature (1185)..(1185): n is a, c, g, or t
  misc_feature (1187)..(1200): n is a, c, g, or t
  misc_feature (1203)..(1221): n is a, c, g, or t
  misc_feature (1223)..(1234): n is a, c, g, or t
  misc_feature (1236)..(1250): n is a, c, g, or t
  misc_feature (1252)..(1252): n is a, c, g, or t
  misc_feature (1254)..(1271): n is a, c, g, or t
  misc_feature (1273)..(1273): n is a, c, g, or t
  misc_feature (1275)..(1294): n is a, c, g, or t
  misc_feature (1296)..(1313): n is a, c, g, or t
  misc_feature (1315)..(1321): n is a, c, g, or t
  misc_feature (1324)..(1330): n is a, c, g, or t
  misc_feature (1333)..(1359): n is a, c, g, or t
tagagaaattactatgagaggatcgcatcaccatcaccatcacggatcctatttaggtgacactatagaatcgtcgacccacgcgtccggtgaatcaggcaccggagtgcaggttcgggggtggaatccttgggccgctgggcaagcggcgagacctggccagggccagcgagccgaggacagagggcgcgcggagggccgggccgcagccccggccgcttgcagaccccgccatggacccgttcctggtgctgctgcactcggtgtcgtccagcctgtcgagcagcgagctgaccgagctcaagttcctatgcctcgggcgcgtgggcaagcgcaagctggagcgcgtgcagagcggcctagacctcttctccatgctgctggagcagaacgacctggagcccgggcacaccgagctcctgcgcgagctgctcgcctccctgcggcgccacgacctgctgcggcgcgtcgacgacttcgaggcgggggcggcggccggggccgcgcctggggaagaagacctgtgtgcagcatttaacgtcatatgtgataatgtggggaaagattggagaaggctggctcgtcagctcaaagtctcanacaccaagatcgacagcatcgaggacagatacccccgcaacctgacagagcgtgtgcgggagtcactganaatctggaanaacacananaagganaacgcaacagtggcccacctggtgggggctctcangtcctgccanatgaacctggtggctgacctgntacaanangttcancangcccgtgacctccanaacaggantggggccatgtccccnaatgtcantgnaactcaaanncatctactccnaacntcntgatggnccnctgntttnnnctnntgnaacanangnatttacaaannctgnanttttgnttntntccnnnaangtanccnannatttnaaaaaccnnnanaannnannttnaatnancnnanaananttgntttttaaattanntnnntttanttatnnnttcccnnnnnnannnnnnnnttngnnncttnnnanaaaatttnnntttntnctnnnnatnnaannnnanaaaattttttnnnnnnanaantnannntnnnnnnnaaannttnaaanntnnnannnnnnnnnnnnnnnaannannnnnnnnnnnanannnnnnnnnttntnnnnnnnnnnnnnnaannnnnnnnnnnnnnnnnnnannnnnnnnnnnnannnnnnnnnnnnnnntntnnnnnnnnnnnnnnnnnnanannnnnnnnnnnnnnnnnnnntnnnnnnnnnnnnnnnnnnannnnnnnttnnnnnnnttnnnnnnnnnnnnnnnnnnnnnnnnnnn

SEQ ID NO: 34 - DNA, 256 bp, Homo Sapiens
  misc_feature (10)..(10): n is a, c, g, or t
  misc_feature (53)..(53): n is a, c, g, or t
  misc_feature (75)..(75): n is a, c, g, or t
tcgagaaatntaaaaaattatttgctttgtgagcggatacaatatatagattnattgtgagcggataacaatttncacagaattattaaagaggagaaattaactatgagaggatcgcatcaccatcaccatcacggatcctatttaggtgacactatagaatcgtcgacccacgcgtccgagcctttcagcaacaaaggccagacgctggtggtgcagttcacggtgaaacatgagcagaacatcgactgtgggg

SEQ ID NO: 35 - DNA, 256 bp, Homo Sapiens
taaggaggagaattaactatgagaggatcgcatcaccatcaccatcacggatcctatttaggtgacactatagaatcgtcgacccacgcgtccggttccattgaagacactagccaggctcaagagctgccaaacctcccctctcccttgcccaagatgaatctggttgagcctccctggcatatgcctcccagagaggaggaagaagaggaagaggaagaggaggagagggagaaggaagaggtagagaaacaag

SEQ ID NO: 36 - DNA, 1677 bp, Homo Sapiens
  misc_feature (4)..(6): n is a, c, g, or t
  misc_feature (8)..(8): n is a, c, g, or t
  misc_feature (10)..(10): n is a, c, g, or t
  misc_feature (12)..(13): n is a, c, g, or t
  misc_feature (20)..(23): n is a, c, g, or t
  misc_feature (31)..(31): n is a, c, g, or t
  misc_feature (33)..(33): n is a, c, g, or t
  misc_feature (39)..(39): n is a, c, g, or t
  misc_feature (42)..(42): n is a, c, g, or t
  misc_feature (44)..(44): n is a, c, g, or t
  misc_feature (48)..(49): n is a, c, g, or t
  misc_feature (53)..(53): n is a, c, g, or t
  misc_feature (63)..(63): n is a, c, g, or t
  misc_feature (69)..(69): n is a, c, g, or t
  misc_feature (71)..(72): n is a, c, g, or t
  misc_feature (74)..(74): n is a, c, g, or t
  misc_feature (76)..(77): n is a, c, g, or t
  misc_feature (97)..(97): n is a, c, g, or t
  misc_feature (99)..(99): n is a, c, g, or t
  misc_feature (105)..(105): n is a, c, g, or t
  misc_feature (112)..(112): n is a, c, g, or t
  misc_feature (180)..(180): n is a, c, g, or t
  misc_feature (199)..(199): n is a, c, g, or t
  misc_feature (213)..(213): n is a, c, g, or t
  misc_feature (238)..(238): n is a, c, g, or t
  misc_feature (243)..(243): n is a, c, g, or t
  misc_feature (246)..(246): n is a, c, g, or t
  misc_feature (253)..(253): n is a, c, g, or t
  misc_feature (257)..(257): n is a, c, g, or t
  misc_feature (265)..(265): n is a, c, g, or t
  misc_feature (274)..(274): n is a, c, g, or t
  misc_feature (287)..(287): n is a, c, g, or t
  misc_feature (292)..(292): n is a, c, g, or t
  misc_feature (295)..(295): n is a, c, g, or t
  misc_feature (303)..(303): n is a, c, g, or t
  misc_feature (307)..(307): n is a, c, g, or t
  misc_feature (309)..(309): n is a, c, g, or t
  misc_feature (316)..(316): n is a, c, g, or t
  misc_feature (325)..(326): n is a, c, g, or t
  misc_feature (330)..(331): n is a, c, g, or t
  misc_feature (334)..(334): n is a, c, g, or t
  misc_feature (336)..(336): n is a, c, g, or t
  misc_feature (341)..(341): n is a, c, g, or t
  misc_feature (345)..(346): n is a, c, g, or t
  misc_feature (350)..(351): n is a, c, g, or t
  misc_feature (354)..(354): n is a, c, g, or t
  misc_feature (360)..(361): n is a, c, g, or t
  misc_feature (367)..(367): n is a, c, g, or t
  misc_feature (372)..(372): n is a, c, g, or t
  misc_feature (375)..(376): n is a, c, g, or t
  misc_feature (386)..(386): n is a, c, g, or t
  misc_feature (389)..(389): n is a, c, g, or t
  misc_feature (393)..(394): n is a, c, g, or t
  misc_feature (398)..(400): n is a, c, g, or t
  misc_feature (404)..(405): n is a, c, g, or t
  misc_feature (409)..(409): n is a, c, g, or t
  misc_feature (415)..(415): n is a, c, g, or t
  misc_feature (420)..(420): n is a, c, g, or t
  misc_feature (423)..(423): n is a, c, g, or t
  misc_feature (429)..(431): n is a, c, g, or t
  misc_feature (439)..(439): n is a, c, g, or t
  misc_feature (442)..(444): n is a, c, g, or t
  misc_feature (455)..(457): n is a, c, g, or t
  misc_feature (466)..(466): n is a, c, g, or t
  misc_feature (477)..(477): n is a, c, g, or t
  misc_feature (481)..(481): n is a, c, g, or t
  misc_feature (488)..(488): n is a, c, g, or t
  misc_feature (491)..(491): n is a, c, g, or t
  misc_feature (493)..(496): n is a, c, g, or t
  misc_feature (499)..(499): n is a, c, g, or t
  misc_feature (504)..(504): n is a, c, g, or t
  misc_feature (507)..(507): n is a, c, g, or t
  misc_feature (510)..(510): n is a, c, g, or t
  misc_feature (518)..(518): n is a, c, g, or t
  misc_feature (525)..(525): n is a, c, g, or t
  misc_feature (531)..(532): n is a, c, g, or t
  misc_feature (534)..(535): n is a, c, g, or t
  misc_feature (537)..(537): n is a, c, g, or t
  misc_feature (541)..(541): n is a, c, g, or t
  misc_feature (543)..(543): n is a, c, g, or t
  misc_feature (545)..(545): n is a, c, g, or t
  misc_feature (548)..(548): n is a, c, g, or t
  misc_feature (553)..(553): n is a, c, g, or t
  misc_feature (556)..(557): n is a, c, g, or t
  misc_feature (559)..(559): n is a, c, g, or t
  misc_feature (571)..(572): n is a, c, g, or t
  misc_feature (578)..(579): n is a, c, g, or t
  misc_feature (587)..(587): n is a, c, g, or t
  misc_feature (595)..(596): n is a, c, g, or t
  misc_feature (603)..(603): n is a, c, g, or t
  misc_feature (605)..(605): n is a, c, g, or t
  misc_feature (608)..(608): n is a, c, g, or t
  misc_feature (613)..(613): n is a, c, g, or t
  misc_feature (617)..(617): n is a, c, g, or t
  misc_feature (620)..(620): n is a, c, g, or t
  misc_feature (629)..(629): n is a, c, g, or t
  misc_feature (632)..(634): n is a, c, g, or t
  misc_feature (638)..(641): n is a, c, g, or t
  misc_feature (645)..(645): n is a, c, g, or t
  misc_feature (648)..(650): n is a, c, g, or t
  misc_feature (654)..(654): n is a, c, g, or t
  misc_feature (657)..(657): n is a, c, g, or t
  misc_feature (659)..(659): n is a, c, g, or t
  misc_feature (661)..(661): n is a, c, g, or t
  misc_feature (665)..(666): n is a, c, g, or t
  misc_feature (669)..(669): n is a, c, g, or t
  misc_feature (672)..(673): n is a, c, g, or t
  misc_feature (675)..(675): n is a, c, g, or t
  misc_feature (678)..(678): n is a, c, g, or t
  misc_feature (682)..(682): n is a, c, g, or t
  misc_feature (684)..(685): n is a, c, g, or t
  misc_feature (687)..(688): n is a, c, g, or t
  misc_feature (690)..(692): n is a, c, g, or t
  misc_feature (695)..(697): n is a, c, g, or t
  misc_feature (702)..(702): n is a, c, g, or t
  misc_feature (715)..(715): n is a, c, g, or t
  misc_feature (717)..(717): n is a, c, g, or t
  misc_feature (719)..(719): n is a, c, g, or t
  misc_feature (721)..(721): n is a, c, g, or t
  misc_feature (724)..(726): n is a, c, g, or t
  misc_feature (729)..(730): n is a, c, g, or t
  misc_feature (732)..(732): n is a, c, g, or t
  misc_feature (737)..(738): n is a, c, g, or t
  misc_feature (741)..(741): n is a, c, g, or t
  misc_feature (749)..(750): n is a, c, g, or t
  misc_feature (758)..(758): n is a, c, g, or t
  misc_feature (762)..(762): n is a, c, g, or t
  misc_feature (764)..(764): n is a, c, g, or t
  misc_feature (776)..(776): n is a, c, g, or t
  misc_feature (783)..(784): n is a, c, g, or t
  misc_feature (787)..(787): n is a, c, g, or t
  misc_feature (790)..(790): n is a, c, g, or t
  misc_feature (796)..(796): n is a, c, g, or t
  misc_feature (799)..(801): n is a, c, g, or t
  misc_feature (811)..(814): n is a, c, g, or t
  misc_feature (818)..(818): n is a, c, g, or t
  misc_feature (821)..(821): n is a, c, g, or t
  misc_feature (823)..(823): n is a, c, g, or t
  misc_feature (825)..(825): n is a, c, g, or t
  misc_feature (830)..(830): n is a, c, g, or t
  misc_feature (835)..(835): n is a, c, g, or t
  misc_feature (837)..(838): n is a, c, g, or t
  misc_feature (842)..(846): n is a, c, g, or t
  misc_feature (852)..(854): n is a, c, g, or t
  misc_feature (858)..(858): n is a, c, g, or t
  misc_feature (860)..(861): n is a, c, g, or t
  misc_feature (868)..(870): n is a, c, g, or t
  misc_feature (879)..(879): n is a, c, g, or t
  misc_feature (883)..(883): n is a, c, g, or t
  misc_feature (887)..(887): n is a, c, g, or t
  misc_feature (889)..(889): n is a, c, g, or t
  misc_feature (891)..(891): n is a, c, g, or t
  misc_feature (895)..(895): n is a, c, g, or t
  misc_feature (899)..(900): n is a, c, g, or t
  misc_feature (909)..(910): n is a, c, g, or t
  misc_feature (917)..(917): n is a, c, g, or t
  misc_feature (921)..(921): n is a, c, g, or t
  misc_feature (925)..(925): n is a, c, g, or t
  misc_feature (928)..(928): n is a, c, g, or t
  misc_feature (931)..(931): n is a, c, g, or t
  misc_feature (935)..(935): n is a, c, g, or t
  misc_feature (938)..(938): n is a, c, g, or t
  misc_feature (941)..(941): n is a, c, g, or t
  misc_feature (948)..(948): n is a, c, g, or t
  misc_feature (952)..(952): n is a, c, g, or t
  misc_feature (957)..(957): n is a, c, g, or t
  misc_feature (963)..(964): n is a, c, g, or t
  misc_feature (972)..(973): n is a, c, g, or t
  misc_feature (975)..(976): n is a, c, g, or t
  misc_feature (978)..(978): n is a, c, g, or t
  misc_feature (984)..(984): n is a, c, g, or t
  misc_feature (987)..(990): n is a, c, g, or t
  misc_feature (997)..(997): n is a, c, g, or t
  misc_feature (1001)..(1001): n is a, c, g, or t
  misc_feature (1008)..(1008): n is a, c, g, or t
  misc_feature (1012)..(1013): n is a, c, g, or t
  misc_feature (1015)..(1015): n is a, c, g, or t
  misc_feature (1017)..(1017): n is a, c, g, or t
  misc_feature (1021)..(1021): n is a, c, g, or t
  misc_feature (1023)..(1023): n is a, c, g, or t
  misc_feature (1032)..(1032): n is a, c, g, or t
  misc_feature (1035)..(1035): n is a, c, g, or t
  misc_feature (1040)..(1040): n is a, c, g, or t
  misc_feature (1043)..(1043): n is a, c, g, or t
  misc_feature (1046)..(1046): n is a, c, g, or t
  misc_feature (1048)..(1048): n is a, c, g, or t
  misc_feature (1051)..(1051): n is a, c, g, or t
  misc_feature (1059)..(1059): n is a, c, g, or t
  misc_feature (1061)..(1062): n is a, c, g, or t
  misc_feature (1067)..(1068): n is a, c, g, or t
  misc_feature (1076)..(1076): n is a, c, g, or t
  misc_feature (1082)..(1082): n is a, c, g, or t
  misc_feature (1089)..(1089): n is a, c, g, or t
  misc_feature (1100)..(1102): n is a, c, g, or t
  misc_feature (1105)..(1105): n is a, c, g, or t
  misc_feature (1108)..(1108): n is a, c, g, or t
  misc_feature (1110)..(1111): n is a, c, g, or t
  misc_feature (1118)..(1118): n is a, c, g, or t
  misc_feature (1120)..(1120): n is a, c, g, or t
  misc_feature (1123)..(1123): n is a, c, g, or t
  misc_feature (1128)..(1128): n is a, c, g, or t
  misc_feature (1140)..(1140): n is a, c, g, or t
  misc_feature (1146)..(1146): n is a, c, g, or t
  misc_feature (1148)..(1148): n is a, c, g, or t
  misc_feature (1150)..(1150): n is a, c, g, or t
  misc_feature (1154)..(1155): n is a, c, g, or t
  misc_feature (1159)..(1159): n is a, c, g, or t
  misc_feature (1161)..(1161): n is a, c, g, or t
  misc_feature (1163)..(1163): n is a, c, g, or t
  misc_feature (1165)..(1165): n is a, c, g, or t
  misc_feature (1171)..(1171): n is a, c, g, or t
  misc_feature (1176)..(1176): n is a, c, g, or t
  misc_feature (1186)..(1186): n is a, c, g, or t
  misc_feature (1188)..(1190): n is a, c, g, or t
  misc_feature (1201)..(1201): n is a, c, g, or t
  misc_feature (1205)..(1205): n is a, c, g, or t
  misc_feature (1209)..(1209): n is a, c, g, or t
  misc_feature (1215)..(1215): n is a, c, g, or t
  misc_feature (1218)..(1218): n is a, c, g, or t
  misc_feature (1222)..(1223): n is a, c, g, or t
  misc_feature (1226)..(1226): n is a, c, g, or t
  misc_feature (1228)..(1231): n is a, c, g, or t
  misc_feature (1235)..(1235): n is a, c, g, or t
  misc_feature (1238)..(1239): n is a, c, g, or t
  misc_feature (1246)..(1246): n is a, c, g, or t
  misc_feature (1248)..(1248): n is a, c, g, or t
  misc_feature (1250)..(1250): n is a, c, g, or t
  misc_feature (1254)..(1254): n is a, c, g, or t
  misc_feature (1258)..(1258): n is a, c, g, or t
  misc_feature (1263)..(1263): n is a, c, g, or t
  misc_feature (1266)..(1266): n is a, c, g, or t
  misc_feature (1278)..(1278): n is a, c, g, or t
  misc_feature (1281)..(1281): n is a, c, g, or t
  misc_feature (1283)..(1283): n is a, c, g, or t
  misc_feature (1288)..(1289): n is a, c, g, or t
  misc_feature (1292)..(1292): n is a, c, g, or t
  misc_feature (1294)..(1294): n is a, c, g, or t
  misc_feature (1296)..(1296): n is a, c, g, or t
  misc_feature (1299)..(1299): n is a, c, g, or t
  misc_feature (1301)..(1301): n is a, c, g, or t
  misc_feature (1304)..(1304): n is a, c, g, or t
  misc_feature (1306)..(1306): n is a, c, g, or t
  misc_feature (1308)..(1309): n is a, c, g, or t
  misc_feature (1311)..(1311): n is a, c, g, or t
  misc_feature (1313)..(1316): n is a, c, g, or t
  misc_feature (1321)..(1321): n is a, c, g, or t
  misc_feature (1329)..(1329): n is a, c, g, or t
  misc_feature (1333)..(1334): n is a, c, g, or t
  misc_feature (1344)..(1344): n is a, c, g, or t
  misc_feature (1353)..(1353): n is a, c, g, or t
  misc_feature (1370)..(1370): n is a, c, g, or t
  misc_feature (1372)..(1372): n is a, c, g, or t
  misc_feature (1379)..(1379): n is a, c, g, or t
  misc_feature (1384)..(1384): n is a, c, g, or t
  misc_feature (1386)..(1387): n is a, c, g, or t
  misc_feature (1389)..(1390): n is a, c, g, or t
  misc_feature (1399)..(1399): n is a, c, g, or t
  misc_feature (1402)..(1402): n is a, c, g, or t
  misc_feature (1407)..(1409): n is a, c, g, or t
  misc_feature (1417)..(1417): n is a, c, g, or t
  misc_feature (1419)..(1419): n is a, c, g, or t
  misc_feature (1422)..(1422): n is a, c, g, or t
  misc_feature (1428)..(1428): n is a, c, g, or t
  misc_feature (1433)..(1433): n is a, c, g, or t
  misc_feature (1435)..(1435): n is a, c, g, or t
  misc_feature (1437)..(1437): n is a, c, g, or t
  misc_feature (1439)..(1439): n is a, c, g, or t
  misc_feature (1442)..(1442): n is a, c, g, or t
  misc_feature (1447)..(1447): n is a, c, g, or t
  misc_feature (1458)..(1459): n is a, c, g, or t
  misc_feature (1461)..(1462): n is a, c, g, or t
  misc_feature (1465)..(1465): n is a, c, g, or t
  misc_feature (1474)..(1477): n is a, c, g, or t
  misc_feature (1481)..(1482): n is a, c, g, or t
  misc_feature (1484)..(1484): n is a, c, g, or t
  misc_feature (1488)..(1489): n is a, c, g, or t
  misc_feature (1494)..(1494): n is a, c, g, or t
  misc_feature (1498)..(1498): n is a, c, g, or t
  misc_feature (1500)..(1500): n is a, c, g, or t
  misc_feature (1504)..(1505): n is a, c, g, or t
  misc_feature (1511)..(1511): n is a, c, g, or t
  misc_feature (1518)..(1518): n is a, c, g, or t
  misc_feature (1532)..(1532): n is a, c, g, or t
  misc_feature (1536)..(1538): n is a, c, g, or t
  misc_feature (1542)..(1542): n is a, c, g, or t
  misc_feature (1544)..(1544): n is a, c, g, or t
  misc_feature (1546)..(1546): n is a, c, g, or t
  misc_feature (1548)..(1549): n is a, c, g, or t
  misc_feature (1552)..(1552): n is a, c, g, or t
  misc_feature (1558)..(1558): n is a, c, g, or t
  misc_feature (1563)..(1563): n is a, c, g, or t
  misc_feature (1568)..(1568): n is a, c, g, or t
  misc_feature (1581)..(1581): n is a, c, g, or t
  misc_feature (1583)..(1583): n is a, c, g, or t
  misc_feature (1586)..(1586): n is a, c, g, or t
  misc_feature (1589)..(1589): n is a, c, g, or t
  misc_feature (1591)..(1591): n is a, c, g, or t
  misc_feature (1594)..(1595): n is a, c, g, or t
  misc_feature (1598)..(1598): n is a, c, g, or t
  misc_feature (1606)..(1606): n is a, c, g, or t
  misc_feature (1614)..(1614): n is a, c, g, or t
  misc_feature (1616)..(1616): n is a, c, g, or t
  misc_feature (1624)..(1624): n is a, c, g, or t
  misc_feature (1633)..(1633): n is a, c, g, or t
  misc_feature (1645)..(1645): n is a, c, g, or t
  misc_feature (1651)..(1652): n is a, c, g, or t
  misc_feature (1670)..(1671): n is a, c, g, or t
  misc_feature (1675)..(1676): n is a, c, g, or t
cccnnnantnannaaataannnntataaagngnggtttntcncncccnnttcntgggatcctntttacngnngngnntatataaatcgatcgacccncncggtcnggcgcancccccgcctcccccgggacccccgcagcagctgcccctgccgcccgcgcctgcaggctcaggaagcanccccagggccgactcgaanccaccgcttcccancaagctgccgagacccaaggcgggncccangcngctccancttnactactgngacatctgnaagatcagctganctggnccncaggtcantcgncntcctgcnatgggcagnncccnngananctctntgtnncaanngtntgaacnngaatgngggcnccnntggtgtggtnatnggtnnctgnnngccnnaaangaaagncctgntgntaactnnnatgtttgnatnnntgctcctgagnnntacaatacnctttgttatgngtgnagacaanaantnnnnctnctgtnctntantaacattntgttctntagatnntnntnaaanantntgnaattnganntnattgcaaaatannaatctnntaacaaantaatgttnnttatttnanctntaatngagnttngaaatgagntannnttgnnnntgtntcnnngatnttntnanaaanntcntannanaanttcnanntnntnnnatnnncgatnaaaaaattaactnanantnaannnatnncntaaanntantgccattnnaatagctnaaangntcattgaaaaanaactctnntcnaanaatatncannnttttctactnnnntaanaantnanacctntaatnannttannnnnttaatnnnctananntgaattnnntaagtaaanttanttanancnaatnccannaattcattnntaatttnaagnaatnatngantaanttnaanatatatnttantttcngaaatnntatacatnncnnanatttcnatnnnnaaaaacnaaancataaantttnntnanaaantncttatgtanttnttttntanttncnaanttacattntnnaatannatctaaantcaatntacaaanaatgctcatannnttntangnnatatgtntntanccctnatattaccaatnataaangnanttcnntatntncnantaattntctanttaacaattnannntattatttacnttantatnttattnacntaannatntnnnnactnatnntatatancnanattnaacnataanttnttactttatatnaanantacanntanantnttntnaantntnntncnnnnaatantttacatntctnnatctaaacanaatatcacnaaattttttaaattaancnattaatntttanannanntaaacatanttnaatgnnntcaaatantnaanattaantatcnantntnaanatttnaattattaatnntnnatntcataattnnnncctnntntacnntcatntatnanttcnntattancttacgnttatccttatatantatnnnttcntncnannttnttattntaatnaaacntgatatctacatncnacntcnanttnnaanttatatantataatcnanataataanatactattnaaaaaattattnaatatnntatattcatattactttnnattnnc

SEQ ID NO: 37 - DNA, 256 bp, Homo Sapiens
  misc_feature (5)..(5): n is a, c, g, or t
tcganaatataaaaaattatttgctttgtgagcggatacaatataatagattaattgtgagcggataacaatttacacagaattattaaagaggagaaattaactatgagaggatcgcatcaccatcaccatcacggatcctatttaggtgacactatagaatcgtcgacccacgcgtccggggacagcagccacttcatctcagggggcaaggactgcctggtgctggtttggagcctctgcagcgtgctgcagg

SEQ ID NO: 38 - DNA, 1403 bp, Homo Sapiens
  misc_feature (788)..(788): n is a, c, g, or t
  misc_feature (862)..(862): n is a, c, g, or t
  misc_feature (870)..(870): n is a, c, g, or t
  misc_feature (882)..(882): n is a, c, g, or t
  misc_feature (907)..(907): n is a, c, g, or t
  misc_feature (920)..(920): n is a, c, g, or t
  misc_feature (922)..(922): n is a, c, g, or t
  misc_feature (931)..(931): n is a, c, g, or t
  misc_feature (956)..(956): n is a, c, g, or t
  misc_feature (992)..(992): n is a, c, g, or t
  misc_feature (995)..(995): n is a, c, g, or t
  misc_feature (1009)..(1009): n is a, c, g, or t
  misc_feature (1017)..(1017): n is a, c, g, or t
  misc_feature (1020)..(1020): n is a, c, g, or t
  misc_feature (1030)..(1030): n is a, c, g, or t
  misc_feature (1033)..(1033): n is a, c, g, or t
  misc_feature (1035)..(1035): n is a, c, g, or t
  misc_feature (1043)..(1043): n is a, c, g, or t
  misc_feature (1049)..(1049): n is a, c, g, or t
  misc_feature (1054)..(1054): n is a, c, g, or t
  misc_feature (1060)..(1060): n is a, c, g, or t
  misc_feature (1062)..(1062): n is a, c, g, or t
  misc_feature (1064)..(1064): n is a, c, g, or t
  misc_feature (1074)..(1074): n is a, c, g, or t
  misc_feature (1080)..(1081): n is a, c, g, or t
  misc_feature (1084)..(1085): n is a, c, g, or t
  misc_feature (1087)..(1087): n is a, c, g, or t
  misc_feature (1092)..(1092): n is a, c, g, or t
  misc_feature (1094)..(1094): n is a, c, g, or t
  misc_feature (1098)..(1098): n is a, c, g, or t
  misc_feature (1103)..(1103): n is a, c, g, or t
  misc_feature (1107)..(1109): n is a, c, g, or t
  misc_feature (1117)..(1118): n is a, c, g, or t
  misc_feature (1123)..(1126): n is a, c, g, or t
  misc_feature (1133)..(1133): n is a, c, g, or t
  misc_feature (1147)..(1147): n is a, c, g, or t
  misc_feature (1149)..(1150): n is a, c, g, or t
  misc_feature (1152)..(1152): n is a, c, g, or t
  misc_feature (1159)..(1159): n is a, c, g, or t
  misc_feature (1162)..(1162): n is a, c, g, or t
  misc_feature (1164)..(1165): n is a, c, g, or t
  misc_feature (1169)..(1169): n is a, c, g, or t
  misc_feature (1171)..(1172): n is a, c, g, or t
  misc_feature (1175)..(1175): n is a, c, g, or t
  misc_feature (1191)..(1192): n is a, c, g, or t
  misc_feature (1195)..(1196): n is a, c, g, or t
  misc_feature (1199)..(1199): n is a, c, g, or t
  misc_feature (1204)..(1204): n is a, c, g, or t
  misc_feature (1211)..(1211): n is a, c, g, or t
  misc_feature (1214)..(1214): n is a, c, g, or t
  misc_feature (1216)..(1217): n is a, c, g, or t
  misc_feature (1221)..(1224): n is a, c, g, or t
  misc_feature (1226)..(1226): n is a, c, g, or t
  misc_feature (1230)..(1230): n is a, c, g, or t
  misc_feature (1234)..(1234): n is a, c, g, or t
  misc_feature (1236)..(1236): n is a, c, g, or t
  misc_feature (1238)..(1238): n is a, c, g, or t
  misc_feature (1240)..(1240): n is a, c, g, or t
  misc_feature (1243)..(1243): n is a, c, g, or t
  misc_feature (1247)..(1247): n is a, c, g, or t
  misc_feature (1252)..(1254): n is a, c, g, or t
  misc_feature (1262)..(1265): n is a, c, g, or t
  misc_feature (1267)..(1268): n is a, c, g, or t
  misc_feature (1273)..(1273): n is a, c, g, or t
  misc_feature (1275)..(1276): n is a, c, g, or t
  misc_feature (1284)..(1284): n is a, c, g, or t
  misc_feature (1302)..(1303): n is a, c, g, or t
  misc_feature (1307)..(1309): n is a, c, g, or t
  misc_feature (1311)..(1311): n is a, c, g, or t
  misc_feature (1315)..(1315): n is a, c, g, or t
  misc_feature (1317)..(1319): n is a, c, g, or t
  misc_feature (1322)..(1322): n is a, c, g, or t
  misc_feature (1327)..(1328): n is a, c, g, or t
  misc_feature (1337)..(1337): n is a, c, g, or t
  misc_feature (1339)..(1339): n is a, c, g, or t
  misc_feature (1347)..(1349): n is a, c, g, or t
  misc_feature (1351)..(1352): n is a, c, g, or t
  misc_feature (1356)..(1357): n is a, c, g, or t
  misc_feature (1363)..(1364): n is a, c, g, or t
  misc_feature (1367)..(1369): n is a, c, g, or t
  misc_feature (1373)..(1376): n is a, c, g, or t
  misc_feature (1380)..(1382): n is a, c, g, or t
  misc_feature (1387)..(1387): n is a, c, g, or t
  misc_feature (1390)..(1391): n is a, c, g, or t
  misc_feature (1395)..(1397): n is a, c, g, or t
  misc_feature (1403)..(1403): n is a, c, g, or t
tagagaaattactatgagaggatcgcatcaccatcaccatcacggatcctatttaggtgacactatagaatcgtcgacccacgcgtccgcggacgcgtgggcggacgcgtgggtcaagtcggcctgcaaggaagacatccccagcgaaaagagtgaggagatcactactggcagtgcctggtttagcttcctggagagccacaacaagctggacaaagacaacctctcctacattgagcacatctttgagatctcccgccgtcctgacctactcactatggtggttgactacagaacccgtgtgctgaagatctctgaggaggatgagctggacaccaagctaacccgtatccccagtgccaagaagtacaaagacattatccggcagccctctgaggaagagatcatcaaattggctcccccaccgaagaaggcctgagcaagggggaggaagaggaggaaggttggaccttcatcagaccactcccttcccccatcctccaggagagggggcaagggcaacccaccatctacccacttactaacctggtcctaacccccttactgtgcgcgtgtgtgtgcgtgtgcgcacgctctggctgtttgtctatatgtctagctcatctagttcctcttcttaaggggatgggggtcaggggctaggggagggggctgagtttccccactttaggaggaggtgggggctatttctatgcaaatagaaatcagcacattcctcctacttccctttcctccactccccccatatctttaaagtgtggaagcanaaaggacctgcattttcctacattgaggagctgacataggggtaaggtatgggagaggtaggtggatccagggnaaaagcantggggacggaangctttttcaaaaaacattaaattcncatgcagtctcananactatttanacaaagttcagttaggagcttttangatgggggagtaaactttaatgggaagggaaggctnggntgctggaaaaaagnaaaaaccnaantgggttaaanagnantcttaaantcctancccancctaangngncctgcccctntggccnntgnngnaaaancntgcnttaanaccnnnccctttannattcnnnnttttccntaaaggactttccnanntnccctttnccngnngggntnnccntaaaaaaaaaaaaaannttnnaanttggnggggggnaanannaaannnncnttcntttngnantnttntttnagggnnnaaaaaaannnncnnttttntnnaaaaaggnaaaaaaaaggtttttttnnaaannnantttntnnnggnaaaanntaaaaaaancncccccccnnnanngggnnaacccnnttnnntttnnnngggnnnttttnccnnaaannntttttn

SEQ ID NO: 39 - DNA, 1449 bp, Homo Sapiens
  misc_feature (6)..(7): n is a, c, g, or t
  misc_feature (14)..(14): n is a, c, g, or t
  misc_feature (260)..(260): n is a, c, g, or t
  misc_feature (265)..(265): n is a, c, g, or t
  misc_feature (360)..(360): n is a, c, g, or t
  misc_feature (362)..(362): n is a, c, g, or t
  misc_feature (375)..(375): n is a, c, g, or t
  misc_feature (384)..(384): n is a, c, g, or t
  misc_feature (389)..(389): n is a, c, g, or t
  misc_feature (391)..(391): n is a, c, g, or t
  misc_feature (410)..(410): n is a, c, g, or t
  misc_feature (415)..(415): n is a, c, g, or t
  misc_feature (417)..(417): n is a, c, g, or t
  misc_feature (443)..(443): n is a, c, g, or t
  misc_feature (457)..(457): n is a, c, g, or t
  misc_feature (462)..(462): n is a, c, g, or t
  misc_feature (470)..(470): n is a, c, g, or t
  misc_feature (483)..(483): n is a, c, g, or t
  misc_feature (491)..(491): n is a, c, g, or t
  misc_feature (515)..(515): n is a, c, g, or t
  misc_feature (521)..(521): n is a, c, g, or t
  misc_feature (526)..(527): n is a, c, g, or t
  misc_feature (538)..(538): n is a, c, g, or t
  misc_feature (544)..(544): n is a, c, g, or t
  misc_feature (548)..(548): n is a, c, g, or t
  misc_feature (587)..(587): n is a, c, g, or t
  misc_feature (590)..(590): n is a, c, g, or t
  misc_feature (598)..(599): n is a, c, g, or t
  misc_feature (614)..(614): n is a, c, g, or t
  misc_feature (620)..(620): n is a, c, g, or t
  misc_feature (627)..(627): n is a, c, g, or t
  misc_feature (634)..(636): n is a, c, g, or t
  misc_feature (638)..(638): n is a, c, g, or t
  misc_feature (643)..(643): n is a, c, g, or t
  misc_feature (651)..(651): n is a, c, g, or t
  misc_feature (664)..(664): n is a, c, g, or t
  misc_feature (676)..(676): n is a, c, g, or t
  misc_feature (679)..(679): n is a, c, g, or t
  misc_feature (686)..(687): n is a, c, g, or t
  misc_feature (694)..(694): n is a, c, g, or t
  misc_feature (709)..(709): n is a, c, g, or t
  misc_feature (722)..(722): n is a, c, g, or t
  misc_feature (727)..(727): n is a, c, g, or t
  misc_feature (731)..(731): n is a, c, g, or t
  misc_feature (739)..(739): n is a, c, g, or t
  misc_feature (742)..(742): n is a, c, g, or t
  misc_feature (744)..(744): n is a, c, g, or t
  misc_feature (748)..(748): n is a, c, g, or t
  misc_feature (762)..(762): n is a, c, g, or t
  misc_feature (765)..(768): n is a, c, g, or t
  misc_feature (775)..(775): n is a, c, g, or t
  misc_feature (777)..(777): n is a, c, g, or t
  misc_feature (783)..(783): n is a, c, g, or t
  misc_feature (791)..(791): n is a, c, g, or t
  misc_feature (795)..(795): n is a, c, g, or t
  misc_feature (803)..(803): n is a, c, g, or t
  misc_feature (813)..(815): n is a, c, g, or t
  misc_feature (821)..(821): n is a, c, g, or t
  misc_feature (823)..(823): n is a, c, g, or t
  misc_feature (828)..(829): n is a, c, g, or t
  misc_feature (834)..(834): n is a, c, g, or t
  misc_feature (839)..(839): n is a, c, g, or t
  misc_feature (842)..(842): n is a, c, g, or t
  misc_feature (851)..(852): n is a, c, g, or t
  misc_feature (854)..(854): n is a, c, g, or t
  misc_feature (856)..(856): n is a, c, g, or t
  misc_feature (863)..(863): n is a, c, g, or t
  misc_feature (865)..(865): n is a, c, g, or t
  misc_feature (868)..(868): n is a, c, g, or t
  misc_feature (871)..(871): n is a, c, g, or t
  misc_feature (896)..(897): n is a, c, g, or t
  misc_feature (900)..(900): n is a, c, g, or t
  misc_feature (904)..(904): n is a, c, g, or t
  misc_feature (906)..(906): n is a, c, g, or t
  misc_feature (912)..(912): n is a, c, g, or t
  misc_feature (914)..(914): n is a, c, g, or t
  misc_feature (917)..(917): n is a, c, g, or t
  misc_feature (920)..(920): n is a, c, g, or t
  misc_feature (923)..(923): n is a, c, g, or t
  misc_feature (931)..(931): n is a, c, g, or t
  misc_feature (934)..(935): n is a, c, g, or t
  misc_feature (937)..(937): n is a, c, g, or t
  misc_feature (941)..(942): n is a, c, g, or t
  misc_feature (948)..(948): n is a, c, g, or t
  misc_feature (951)..(951): n is a, c, g, or t
  misc_feature (955)..(955): n is a, c, g, or t
  misc_feature (965)..(965): n is a, c, g, or t
  misc_feature (976)..(976): n is a, c, g, or t
  misc_feature (979)..(979): n is a, c, g, or t
  misc_feature (981)..(981): n is a, c, g, or t
  misc_feature (984)..(984): n is a, c, g, or t
  misc_feature (1004)..(1004): n is a, c, g, or t
  misc_feature (1016)..(1016): n is a, c, g, or t
  misc_feature (1023)..(1025): n is a, c, g, or t
  misc_feature (1027)..(1027): n is a, c, g, or t
  misc_feature (1032)..(1032): n is a, c, g, or t
  misc_feature (1034)..(1034): n is a, c, g, or t
  misc_feature (1040)..(1040): n is a, c, g, or t
  misc_feature (1046)..(1046): n is a, c, g, or t
  misc_feature (1049)..(1049): n is a, c, g, or t
  misc_feature (1053)..(1053): n is a, c, g, or t
  misc_feature (1055)..(1055): n is a, c, g, or t
  misc_feature (1057)..(1057): n is a, c, g, or t
  misc_feature (1061)..(1063): n is a, c, g, or t
  misc_feature (1065)..(1065): n is a, c, g, or t
  misc_feature (1068)..(1068): n is a, c, g, or t
  misc_feature (1070)..(1070): n is a, c, g, or t
  misc_feature (1072)..(1072): n is a, c, g, or t
  misc_feature (1075)..(1076): n is a, c, g, or t
  misc_feature (1082)..(1082): n is a, c, g, or t
  misc_feature (1085)..(1085): n is a, c, g, or t
  misc_feature (1088)..(1088): n is a, c, g, or t
  misc_feature (1090)..(1090): n is a, c, g, or t
  misc_feature (1096)..(1096): n is a, c, g, or t
  misc_feature (1102)..(1102): n is a, c, g, or t
  misc_feature (1111)..(1111): n is a, c, g, or t
  misc_feature (1115)..(1115): n is a, c, g, or t
  misc_feature (1121)..(1121): n is a, c, g, or t
  misc_feature (1135)..(1135): n is a, c, g, or t
  misc_feature (1140)..(1141): n is a, c, g, or t
  misc_feature (1143)..(1145): n is a, c, g, or t
  misc_feature (1148)..(1148): n is a, c, g, or t
  misc_feature (1155)..(1155): n is a, c, g, or t
  misc_feature (1173)..(1173): n is a, c, g, or t
  misc_feature (1177)..(1178): n is a, c, g, or t
  misc_feature (1180)..(1181): n is a, c, g, or t
  misc_feature (1183)..(1186): n is a, c, g, or t
  misc_feature (1189)..(1190): n is a, c, g, or t
  misc_feature (1204)..(1204): n is a, c, g, or t
  misc_feature (1207)..(1207): n is a, c, g, or t
  misc_feature (1211)..(1211): n is a, c, g, or t
  misc_feature (1214)..(1214): n is a, c, g, or t
  misc_feature (1217)..(1217): n is a, c, g, or t
  misc_feature (1219)..(1219): n is a, c, g, or t
  misc_feature (1223)..(1223): n is a, c, g, or t
  misc_feature (1228)..(1228): n is a, c, g, or t
  misc_feature (1231)..(1231): n is a, c, g, or t
  misc_feature (1239)..(1239): n is a, c, g, or t
  misc_feature (1242)..(1242): n is a, c, g, or t
  misc_feature (1246)..(1247): n is a, c, g, or t
  misc_feature (1249)..(1250): n is a, c, g, or t
  misc_feature (1252)..(1253): n is a, c, g, or t
  misc_feature (1259)..(1260): n is a, c, g, or t
  misc_feature (1268)..(1268): n is a, c, g, or t
  misc_feature (1271)..(1271): n is a, c, g, or t
  misc_feature (1274)..(1274): n is a, c, g, or t
  misc_feature (1280)..(1280): n is a, c, g, or t
  misc_feature (1284)..(1284): n is a, c, g, or t
  misc_feature (1295)..(1295): n is a, c, g, or t
  misc_feature (1301)..(1301): n is a, c, g, or t
  misc_feature (1306)..(1307): n is a, c, g, or t
  misc_feature (1309)..(1309): n is a, c, g, or t
  misc_feature (1314)..(1314): n is a, c, g, or t
  misc_feature (1317)..(1317): n is a, c, g, or t
  misc_feature (1319)..(1319): n is a, c, g, or t
  misc_feature (1325)..(1325): n is a, c, g, or t
  misc_feature (1329)..(1329): n is a, c, g, or t
  misc_feature (1333)..(1333): n is a, c, g, or t
  misc_feature (1336)..(1337): n is a, c, g, or t
  misc_feature (1340)..(1341): n is a, c, g, or t
  misc_feature (1344)..(1344): n is a, c, g, or t
  misc_feature (1349)..(1349): n is a, c, g, or t
  misc_feature (1352)..(1352): n is a, c, g, or t
  misc_feature (1355)..(1355): n is a, c, g, or t
  misc_feature (1358)..(1358): n is a, c, g, or t
  misc_feature (1361)..(1361): n is a, c, g, or t
  misc_feature (1363)..(1363): n is a, c, g, or t
  misc_feature (1371)..(1371): n is a, c, g, or t
  misc_feature (1373)..(1373): n is a, c, g, or t
  misc_feature (1381)..(1383): n is a, c, g, or t
  misc_feature (1390)..(1390): n is a, c, g, or t
  misc_feature (1399)..(1399): n is a, c, g, or t
  misc_feature (1403)..(1404): n is a, c, g, or t
  misc_feature (1406)..(1407): n is a, c, g, or t
  misc_feature (1409)..(1412): n is a, c, g, or t
  misc_feature (1415)..(1415): n is a, c, g, or t
  misc_feature (1417)..(1417): n is a, c, g, or t
  misc_feature (1427)..(1427): n is a, c, g, or t
  misc_feature (1431)..(1431): n is a, c, g, or t
  misc_feature (1438)..(1438): n is a, c, g, or t
  misc_feature (1440)..(1440): n is a, c, g, or t
  misc_feature (1443)..(1443): n is a, c, g, or t
  misc_feature (1446)..(1447): n is a, c, g, or t
aaaaanntagaganaattactatgagaggatcgcatcaccatcaccatcacggaatcctatttaggtgacactatagaatcgtcgacccacgcgttccgccggtgctgatgctcagcgctgccccggagcctccgccgcgcccgcctcccgccctctccccaccgggctcgggcccaggctcgggctcccgccatggctcggctcgtcccggtcctaccccagagccgtcggggagcctgggcgcggcgctcgacagcancctgngtgccgccgtggcgttcaaggcagagggccagcgctgctatcgagagaagaagttccgggaggccatcggcaagtaccaccgagcgctgctgcancngaaggcggcgcanggggcccgncctancngcctgcccgcccccgcccncgggncnaccaacagccccgggtcggcgcgccncagcataagagcancggcncctggtgnatagcacggaggnggagtgtnacgactccctcacggattgcctgntgcagncgganntgataaactangaacgngtgngcgagtactgtctcatggtactggataagcacacagggnaanttcaaggnnacctacagtgtcggnattgcnttctacnacctggnnnantactnacgcgctnctgaactacctgnatggaggcccgnaancgagtanntccacanaaacacattgtgttncaataaatccatnctgantctngctgaaanatnanatcntttgcaaacttctnatnnnnaaatacnanttaagnctggtttntcanaactcganatttaatttnnnttgaanancaatnnaaggngaacnttntctaaacanntncnaaattcncnatnttnaaacatgtaaatttcccccaaattnnatnttgntntgtttntnaanaanaantttgtaanttnntntatnnaaatanaantatnataaaattanaatgaaataanttntntanattttgaaattaaaaacaantttaaaataaantaataannnanttttnanatatanaaaaanaantttnanantaannnanttntnanttnngtaatnaanaananttattnataatntcaaatttnacancttttnatataaataataantaatnnannnaanaaattantattttcttttttttcanaaannanntnnnnggnnatatattttttttntantaantanttnanaaanattantanaattttanccnaatnntnntnntaatanntttaaaanaanatnagtaanaacnattttaatttntctaanattanntnaaaanttntnttattncttntatnaanntcnnatnaaatnaanttnaanatntnatattttnantttttaannnttatctnaataaaaantttnntnntnnnnatntntttatatctntctntttttcntntanttnnat

SEQ ID NO: 40 - DNA, 1200 bp, Homo Sapiens
  misc_feature (742)..(742): n is a, c, g, or t
  misc_feature (768)..(768): n is a, c, g, or t
  misc_feature (806)..(806): n is a, c, g, or t
  misc_feature (821)..(821): n is a, c, g, or t
  misc_feature (843)..(843): n is a, c, g, or t
  misc_feature (855)..(855): n is a, c, g, or t
  misc_feature (903)..(903): n is a, c, g, or t
  misc_feature (907)..(907): n is a, c, g, or t
  misc_feature (911)..(911): n is a, c, g, or t
  misc_feature (928)..(928): n is a, c, g, or t
  misc_feature (958)..(958): n is a, c, g, or t
  misc_feature (966)..(966): n is a, c, g, or t
  misc_feature (972)..(972): n is a, c, g, or t
  misc_feature (987)..(987): n is a, c, g, or t
  misc_feature (994)..(994): n is a, c, g, or t
  misc_feature (1006)..(1006): n is a, c, g, or t
  misc_feature (1008)..(1008): n is a, c, g, or t
  misc_feature (1015)..(1015): n is a, c, g, or t
  misc_feature (1022)..(1022): n is a, c, g, or t
  misc_feature (1025)..(1025): n is a, c, g, or t
  misc_feature (1028)..(1028): n is a, c, g, or t
  misc_feature (1030)..(1030): n is a, c, g, or t
  misc_feature (1036)..(1036): n is a, c, g, or t
  misc_feature (1038)..(1038): n is a, c, g, or t
  misc_feature (1042)..(1042): n is a, c, g, or t
  misc_feature (1054)..(1054): n is a, c, g, or t
  misc_feature (1056)..(1056): n is a, c, g, or t
  misc_feature (1060)..(1060): n is a, c, g, or t
  misc_feature (1072)..(1072): n is a, c, g, or t
  misc_feature (1074)..(1074): n is a, c, g, or t
  misc_feature (1077)..(1077): n is a, c, g, or t
  misc_feature (1085)..(1085): n is a, c, g, or t
  misc_feature (1093)..(1094): n is a, c, g, or t
  misc_feature (1098)..(1098): n is a, c, g, or t
  misc_feature (1109)..(1109): n is a, c, g, or t
  misc_feature (1114)..(1114): n is a, c, g, or t
  misc_feature (1137)..(1138): n is a, c, g, or t
  misc_feature (1142)..(1142): n is a, c, g, or t
  misc_feature (1149)..(1149): n is a, c, g, or t
  misc_feature (1151)..(1151): n is a, c, g, or t
  misc_feature (1156)..(1157): n is a, c, g, or t
  misc_feature (1162)..(1163): n is a, c, g, or t
  misc_feature (1165)..(1165): n is a, c, g, or t
  misc_feature (1169)..(1169): n is a, c, g, or t
  misc_feature (1174)..(1174): n is a, c, g, or t
  misc_feature (1183)..(1183): n is a, c, g, or t
  misc_feature (1197)..(1197): n is a, c, g, or t
tagagaaattactatgagaggatcgcatcaccatcaccatcacggatcctatttaggtgacactatagaatcgtcgacccacgcgtccgggagatggcgggagctggtcgcggagcagcggtgtccagggtgcaggcgggtcctgggagtccccggcgagcgcgggggcggcagcaagtgcagccgctggggaagcagcgcccagccccgtggcccgggcttcgcaggtgactgcgctgccccgcgaggccgccacacttccccagagaaggggacgccttgaaggctccgcccgggaccccctagggagcgttcgctcggaccccttccccagcaaagagaagaagaaagtgaactgcaagcccaagaaccaggacgaacaggagattcctttccggctccgggagattatgaggagccgccaagagatgaaaaacccgatcagtaacaagaagaggaagaaagcagcccaggtgaccttcagaaagacattggagaaggaagcaaagggagaggagcccgacatcgcagtccccaagttcaaacagaggaagggggagtccgacggggcctatatccaccgcatgcagcaagaggcccagcatgtgctgttcctcagcaagaaccaggccatccggcagccagaggtgcaggcagctcccaaggagaagtctgagcagaaaaaagcaaaaaaagcgtgagtggaggcgggagggggaggggtctgccctgggagccgganggaagacattgggttcccatgacggnccctctgcaggtaccctgtttcatagccatgggggcancctggattcaggganaccaagccagaacccttggganttggcgagtcgnaacatccagctgggaaccagtgagggtgtggcctccagaaggctgcgnaacntggnaactctgcggaaaaccncccttggtccttgctttcccaggaaaagcnccaaaaanccctanccctgtgggaatcanccctganggggtcgttctnanggtgacntgcccanggnttntnttttcntnaaanaaaatttttttncntccnaaaaaaaataancnttncttatttntttaaaanntttngccaaataaantgggnttccccccttttaatccccaccnntttnggaaggntnaaggnnggggnntncccnagttngggaaattnaaaacccttcttanccc

SEQ ID NO: 41 - DNA, 1407 bp, Homo Sapiens
  misc_feature (4)..(4): n is a, c, g, or t
  misc_feature (754)..(754): n is a, c, g, or t
  misc_feature (757)..(757): n is a, c, g, or t
  misc_feature (829)..(829): n is a, c, g, or t
  misc_feature (844)..(844): n is a, c, g, or t
  misc_feature (876)..(876): n is a, c, g, or t
  misc_feature (882)..(882): n is a, c, g, or t
  misc_feature (899)..(899): n is a, c, g, or t
  misc_feature (917)..(917): n is a, c, g, or t
  misc_feature (943)..(943): n is a, c, g, or t
  misc_feature (959)..(959): n is a, c, g, or t
  misc_feature (975)..(976): n is a, c, g, or t
  misc_feature (978)..(978): n is a, c, g, or t
  misc_feature (989)..(989): n is a, c, g, or t
  misc_feature (991)..(991): n is a, c, g, or t
  misc_feature (997)..(997): n is a, c, g, or t
  misc_feature (1007)..(1008): n is a, c, g, or t
  misc_feature (1021)..(1021): n is a, c, g, or t
  misc_feature (1029)..(1029): n is a, c, g, or t
  misc_feature (1031)..(1031): n is a, c, g, or t
  misc_feature (1035)..(1037): n is a, c, g, or t
  misc_feature (1040)..(1040): n is a, c, g, or t
  misc_feature (1053)..(1053): n is a, c, g, or t
  misc_feature (1062)..(1062): n is a, c, g, or t
  misc_feature (1072)..(1073): n is a, c, g, or t
  misc_feature (1084)..(1084): n is a, c, g, or t
  misc_feature (1089)..(1090): n is a, c, g, or t
  misc_feature (1097)..(1097): n is a, c, g, or t
  misc_feature (1104)..(1104): n is a, c, g, or t
  misc_feature (1113)..(1113): n is a, c, g, or t
  misc_feature (1115)..(1115): n is a, c, g, or t
  misc_feature (1126)..(1126): n is a, c, g, or t
  misc_feature (1131)..(1131): n is a, c, g, or t
  misc_feature (1135)..(1135): n is a, c, g, or t
  misc_feature (1139)..(1139): n is a, c, g, or t
  misc_feature (1143)..(1144): n is a, c, g, or t
  misc_feature (1153)..(1154): n is a, c, g, or t
  misc_feature (1156)..(1156): n is a, c, g, or t
  misc_feature (1169)..(1169): n is a, c, g, or t
  misc_feature (1184)..(1184): n is a, c, g, or t
  misc_feature (1187)..(1188): n is a, c, g, or t
  misc_feature (1191)..(1191): n is a, c, g, or t
  misc_feature (1195)..(1196): n is a, c, g, or t
  misc_feature (1201)..(1201): n is a, c, g, or t
  misc_feature (1203)..(1204): n is a, c, g, or t
  misc_feature (1207)..(1207): n is a, c, g, or t
  misc_feature (1220)..(1221): n is a, c, g, or t
  misc_feature (1228)..(1230): n is a, c, g, or t
  misc_feature (1235)..(1235): n is a, c, g, or t
  misc_feature (1248)..(1248): n is a, c, g, or t
  misc_feature (1256)..(1256): n is a, c, g, or t
  misc_feature (1263)..(1265): n is a, c, g, or t
  misc_feature (1268)..(1268): n is a, c, g, or t
  misc_feature (1274)..(1276): n is a, c, g, or t
  misc_feature (1279)..(1279): n is a, c, g, or t
  misc_feature (1281)..(1281): n is a, c, g, or t
  misc_feature (1286)..(1287): n is a, c, g, or t
  misc_feature (1294)..(1297): n is a, c, g, or t
  misc_feature (1303)..(1303): n is a, c, g, or t
  misc_feature (1305)..(1307): n is a, c, g, or t
  misc_feature (1310)..(1310): n is a, c, g, or t
  misc_feature (1315)..(1315): n is a, c, g, or t
  misc_feature (1319)..(1319): n is a, c, g, or t
  misc_feature (1324)..(1325): n is a, c, g, or t
  misc_feature (1329)..(1329): n is a, c, g, or t
  misc_feature (1331)..(1332): n is a, c, g, or t
  misc_feature (1334)..(1335): n is a, c, g, or t
  misc_feature (1337)..(1338): n is a, c, g, or t
  misc_feature (1344)..(1344): n is a, c, g, or t
  misc_feature (1348)..(1348): n is a, c, g, or t
  misc_feature (1357)..(1358): n is a, c, g, or t
  misc_feature (1360)..(1360): n is a, c, g, or t
  misc_feature (1367)..(1367): n is a, c, g, or t
  misc_feature (1369)..(1370): n is a, c, g, or t
  misc_feature (1378)..(1378): n is a, c, g, or t
  misc_feature (1380)..(1380): n is a, c, g, or t
  misc_feature (1386)..(1386): n is a, c, g, or t
  misc_feature (1390)..(1390): n is a, c, g, or t
  misc_feature (1393)..(1393): n is a, c, g, or t
  misc_feature (1400)..(1400): n is a, c, g, or t
  misc_feature (1402)..(1403): n is a, c, g, or t
  misc_feature (1405)..(1405): n is a, c, g, or t
  misc_feature (1407)..(1407): n is a, c, g, or t
aganaattactatgagaggatcgcatcaccatcaccatcacggatcctatttaggtgacactatagaatcgtcgacccacgcgtccggcgggcagggtgctgacggctgggccacacgctgtctcattgtctctgcagtccgctgcccggcccggaagcggaggaactcacgggatggggacccgctgccctccagcctcagctgcaaggtgcacgtggcatcggtgaacaacttccccacggctgcgggcctggcctcctcagcggcgggctatgcctgcctaggtaccttttgttgcccttgtcgcaggccgcaacctctgcaggccgtgaacagagagtgtccgagagtggaactagcggaggtgggggacagacggctgggccggtgaatgctggcctcaaaggctgatggcccagaagccctgtcatctggaaatccccatttgccgtggggtgtgggacgttcctggggcggtgagctgtcagggagcacagcgcaggcagctctgaggaccctccctgaatccgcatgcctgcagcctacaccctggcccgtgtctacggcgtggagagtgacctctcagaagtggctcgccggggctcaggcagcgcctgccggagcctgtatgggggctttgtggagtggcagatgggagagcaggccgacgggaaggacagcatcgctcggcaagtggcccccgagtcacactggcctgaactccgcgtgctcatccttgtggtgagcgctganaanaagctgacaggcagtaccgtgggcatgcgggccagtgtggagaccagccccctgcttcggttccgggccgantccgtggtgcccgcncgcatggcggaaaatggccccctgcatccggnaacganacttcccccaactttcncccagcttgaccatgaangaacagcaaccagtttccacgccacntgccctcgaaaccttncccgcccatctcttanntnaatgccaattntnctgggngcatcatccnncttggtgcaaccnctttcaancncccnnncanggggaaaaccaanggggcgtanaccttttaanncgggcccccanggccnnaattttncccctgnaaaaaactntngctaaattttngctcnttgntggnaagnnttttccccnngntcaaaggaaaaanttttttaaggcctcnatnnaancccnnccctntnnaantaaatttaagttnncttggcnnngaacnaaaccccgggggnccaaaaanttatttnnncangggggnnnggncnaaatnnaaaaacnnnncccccntnnnttntaaanttgnaaaannattntnntnntnnaaaaancttncctttaaanngngcccccnannaaaaaaanangggggncacntcnaaatagngnntntn

SEQ ID NO: 42 - DNA, 256 bp, Homo Sapiens
attagagaaaattactatgagaggatcgcatcaccatcaccatcacggatcctatttaggtgacactatagaatcgtcgacccacgcgtccgcacagccgcaccccaataccgtctaccagtacggggacatggaggtgaagcagctggacaagcgggcctcaggccagagcttcgaggtcatcctcaagtccccttctgacctgtccccagagagccctatgctctcctccccacccaagaagaaggacacctcc

SEQ ID NO: 43 - DNA, 1200 bp, Homo Sapiens
  misc_feature (920)..(920): n is a, c, g, or t
  misc_feature (922)..(922): n is a, c, g, or t
  misc_feature (940)..(940): n is a, c, g, or t
  misc_feature (960)..(960): n is a, c, g, or t
  misc_feature (970)..(970): n is a, c, g, or t
  misc_feature (972)..(972): n is a, c, g, or t
  misc_feature (976)..(976): n is a, c, g, or t
  misc_feature (982)..(982): n is a, c, g, or t
  misc_feature (986)..(986): n is a, c, g, or t
  misc_feature (993)..(993): n is a, c, g, or t
  misc_feature (999)..(999): n is a, c, g, or t
  misc_feature (1001)..(1001): n is a, c, g, or t
  misc_feature (1005)..(1005): n is a, c, g, or t
  misc_feature (1007)..(1007): n is a, c, g, or t
  misc_feature (1011)..(1011): n is a, c, g, or t
  misc_feature (1020)..(1020): n is a, c, g, or t
  misc_feature (1061)..(1061): n is a, c, g, or t
  misc_feature (1087)..(1087): n is a, c, g, or t
  misc_feature (1108)..(1108): n is a, c, g, or t
  misc_feature (1114)..(1114): n is a, c, g, or t
  misc_feature (1119)..(1119): n is a, c, g, or t
  misc_feature (1124)..(1124): n is a, c, g, or t
  misc_feature (1132)..(1132): n is a, c, g, or t
  misc_feature (1135)..(1135): n is a, c, g, or t
  misc_feature (1141)..(1141): n is a, c, g, or t
  misc_feature (1145)..(1145): n is a, c, g, or t
  misc_feature (1148)..(1148): n is a, c, g, or t
  misc_feature (1157)..(1157): n is a, c, g, or t
  misc_feature (1160)..(1160): n is a, c, g, or t
  misc_feature (1162)..(1162): n is a, c, g, or t
  misc_feature (1165)..(1165): n is a, c, g, or t
  misc_feature (1168)..(1168): n is a, c, g, or t
  misc_feature (1186)..(1186): n is a, c, g, or t
  misc_feature (1189)..(1189): n is a, c, g, or t
  misc_feature (1192)..(1192): n is a, c, g, or t
  misc_feature (1194)..(1197): n is a, c, g, or t
agaaattactatgagaggatcgcatcaccatcaccatcacggatcctatttaggtgacactatagaatcgtcgacccacgcgtccgccgactacgaccccagccagccgaggaagaaaaagcgcgaggcccccttgacgggcaagaagaagcgcaagtcgcccttcgccgcggccgtggggcaggagaagcccgtgttcgaacccggggacaagacgttcgaggagtacctggatgagtattaccggctggactacgaggacatcatcgacgacctgccctgtcgcttcaagtaccgcacagtggtgccctgtgactttggcctcagcactgaggagatcctcgctgctgacgataaggagctgaaccggtggtgctccctaaagaagacctgcatgtacaggtcagagcaggaggagctgcgggacaagcgggcgtacagccagaaggcccagaactcatggaaaaagcggcaggtcttcaagtcactctgccgagaagaggcagagacacctgcggaagccacagggaagccacagagagatgaagccggcccacagaggcagctgccagcccttgatggcagcttgatggggccggagagtcccccagcacaggaagaggaagcccctgtatcaccccacaagaagccagccccccagaagcggaggagggccaagaaggcacggctgctgggccccactgtgatgcttggtggatgcgagttcagccgccagagactgcaggcctttggcctcaaccccaaacggctgcacttccgccagctgggccggcagcggaggaaacaacaggggcccaagaacagctcctgagcaccagggagcaggcaggggcctcaggctcctctcctcaatcaagccctggacagggtctcgcacccacaagtactatctgctgcananatcctctcatctgtggcnaggcacgcctgtattcccancactttggangncgangtgaangatnccttgancccagnanttgnanacancgtgggcanttacgagactcctctctacaaatgggggaccatgcctgtantcccactactcaggagctggggaagnaaatccttaaggcctgatttnaggctnaaaanctttnattgcccnttnccttcncctnggnaaaaaaaanacntnttnttnaaaaaaaaaaaaaatttnaanccngnnnntgg

SEQ ID NO: 44 - DNA, 1425 bp, Homo Sapiens
  misc_feature (697)..(697): n is a, c, g, or t
  misc_feature (758)..(758): n is a, c, g, or t
  misc_feature (763)..(763): n is a, c, g, or t
  misc_feature (783)..(783): n is a, c, g, or t
  misc_feature (786)..(786): n is a, c, g, or t
  misc_feature (788)..(789): n is a, c, g, or t
  misc_feature (798)..(798): n is a, c, g, or t
  misc_feature (806)..(806): n is a, c, g, or t
  misc_feature (810)..(811): n is a, c, g, or t
  misc_feature (816)..(817): n is a, c, g, or t
  misc_feature (819)..(820): n is a, c, g, or t
  misc_feature (823)..(823): n is a, c, g, or t
  misc_feature (827)..(828): n is a, c, g, or t
  misc_feature (833)..(833): n is a, c, g, or t
  misc_feature (837)..(837): n is a, c, g, or t
  misc_feature (844)..(844): n is a, c, g, or t
  misc_feature (846)..(846): n is a, c, g, or t
  misc_feature (848)..(849): n is a, c, g, or t
  misc_feature (853)..(853): n is a, c, g, or t
  misc_feature (857)..(857): n is a, c, g, or t
  misc_feature (862)..(862): n is a, c, g, or t
  misc_feature (869)..(869): n is a, c, g, or t
  misc_feature (872)..(872): n is a, c, g, or t
  misc_feature (875)..(876): n is a, c, g, or t
  misc_feature (878)..(878): n is a, c, g, or t
  misc_feature (887)..(887): n is a, c, g, or t
  misc_feature (889)..(889): n is a, c, g, or t
  misc_feature (891)..(891): n is a, c, g, or t
  misc_feature (893)..(893): n is a, c, g, or t
  misc_feature (899)..(899): n is a, c, g, or t
  misc_feature (908)..(908): n is a, c, g, or t
  misc_feature (913)..(914): n is a, c, g, or t
  misc_feature (916)..(917): n is a, c, g, or t
  misc_feature (919)..(919): n is a, c, g, or t
  misc_feature (927)..(927): n is a, c, g, or t
  misc_feature (929)..(929): n is a, c, g, or t
  misc_feature (931)..(931): n is a, c, g, or t
  misc_feature (934)..(935): n is a, c, g, or t
  misc_feature (938)..(938): n is a, c, g, or t
  misc_feature (940)..(940): n is a, c, g, or t
  misc_feature (942)..(942): n is a, c, g, or t
  misc_feature (949)..(950): n is a, c, g, or t
  misc_feature (952)..(952): n is a, c, g, or t
  misc_feature (955)..(955): n is a, c, g, or t
  misc_feature (957)..(959): n is a, c, g, or t
  misc_feature (975)..(975): n is a, c, g, or t
  misc_feature (984)..(985): n is a, c, g, or t
  misc_feature (990)..(990): n is a, c, g, or t
  misc_feature (999)..(999): n is a, c, g, or t
  misc_feature (1006)..(1006): n is a, c, g, or t
  misc_feature (1010)..(1011): n is a, c, g, or t
  misc_feature (1019)..(1019): n is a, c, g, or t
  misc_feature (1021)..(1021): n is a, c, g, or t
  misc_feature (1027)..(1028): n is a, c, g, or t
  misc_feature (1030)..(1030): n is a, c, g, or t
  misc_feature (1035)..(1035): n is a, c, g, or t
  misc_feature (1038)..(1038): n is a, c, g, or t
  misc_feature (1045)..(1045): n is a, c, g, or t
  misc_feature (1050)..(1052): n is a, c, g, or t
  misc_feature (1064)..(1064): n is a, c, g, or t
  misc_feature (1066)..(1066): n is a, c, g, or t
  misc_feature (1074)..(1074): n is a, c, g, or t
  misc_feature (1081)..(1081): n is a, c, g, or t
  misc_feature (1083)..(1083): n is a, c, g, or t
  misc_feature (1087)..(1087): n is a, c, g, or t
  misc_feature (1090)..(1090): n is a, c, g, or t
  misc_feature (1098)..(1099): n is a, c, g, or t
  misc_feature (1109)..(1109): n is a, c, g, or t
  misc_feature (1112)..(1113): n is a, c, g, or t
  misc_feature (1115)..(1115): n is a, c, g, or t
  misc_feature (1118)..(1119): n is a, c, g, or t
  misc_feature (1124)..(1125): n is a, c, g, or t
  misc_feature (1138)..(1138): n is a, c, g, or t
  misc_feature (1141)..(1142): n is a, c, g, or t
  misc_feature (1145)..(1145): n is a, c, g, or t
  misc_feature (1148)..(1148): n is a, c, g, or t
  misc_feature (1151)..(1151): n is a, c, g, or t
  misc_feature (1158)..(1159): n is a, c, g, or t
  misc_feature (1161)..(1161): n is a, c, g, or t
  misc_feature (1174)..(1174): n is a, c, g, or t
  misc_feature (1176)..(1176): n is a, c, g, or t
  misc_feature (1180)..(1182): n is a, c, g, or t
  misc_feature (1185)..(1185): n is a, c, g, or t
  misc_feature (1187)..(1187): n is a, c, g, or t
  misc_feature (1189)..(1189): n is a, c, g, or t
  misc_feature (1193)..(1193): n is a, c, g, or t
  misc_feature (1202)..(1202): n is a, c, g, or t
  misc_feature (1204)..(1204): n is a, c, g, or t
  misc_feature (1215)..(1216): n is a, c, g, or t
  misc_feature (1220)..(1220): n is a, c, g, or t
  misc_feature (1224)..(1224): n is a, c, g, or t
  misc_feature (1228)..(1228): n is a, c, g, or t
  misc_feature (1236)..(1236): n is a, c, g, or t
  misc_feature (1241)..(1242): n is a, c, g, or t
  misc_feature (1244)..(1245): n is a, c, g, or t
  misc_feature (1249)..(1249): n is a, c, g, or t
  misc_feature (1251)..(1251): n is a, c, g, or t
  misc_feature (1253)..(1253): n is a, c, g, or t
  misc_feature (1260)..(1260): n is a, c, g, or t
  misc_feature (1277)..(1277): n is a, c, g, or t
  misc_feature (1286)..(1286): n is a, c, g, or t
  misc_feature (1289)..(1289): n is a, c, g, or t
  misc_feature (1293)..(1293): n is a, c, g, or t
  misc_feature (1295)..(1295): n is a, c, g, or t
  misc_feature (1302)..(1303): n is a, c, g, or t
  misc_feature (1305)..(1306): n is a, c, g, or t
  misc_feature (1308)..(1308): n is a, c, g, or t
  misc_feature (1310)..(1310): n is a, c, g, or t
  misc_feature (1312)..(1312): n is a, c, g, or t
  misc_feature (1314)..(1314): n is a, c, g, or t
  misc_feature (1316)..(1316): n is a, c, g, or t
  misc_feature (1327)..(1327): n is a, c, g, or t
  misc_feature (1330)..(1330): n is a, c, g, or t
  misc_feature (1336)..(1336): n is a, c, g, or t
  misc_feature (1339)..(1339): n is a, c, g, or t
  misc_feature (1348)..(1348): n is a, c, g, or t
  misc_feature (1352)..(1353): n is a, c, g, or t
  misc_feature (1355)..(1355): n is a, c, g, or t
  misc_feature (1359)..(1359): n is a, c, g, or t
  misc_feature (1365)..(1365): n is a, c, g, or t
  misc_feature (1371)..(1371): n is a, c, g, or t
  misc_feature (1375)..(1375): n is a, c, g, or t
  misc_feature (1378)..(1378): n is a, c, g, or t
  misc_feature (1382)..(1382): n is a, c, g, or t
  misc_feature (1385)..(1385): n is a, c, g, or t
  misc_feature (1389)..(1389): n is a, c, g, or t
  misc_feature (1393)..(1394): n is a, c, g, or t
  misc_feature (1397)..(1397): n is a, c, g, or t
  misc_feature (1401)..(1403): n is a, c, g, or t
  misc_feature (1406)..(1406): n is a, c, g, or t
  misc_feature (1408)..(1408): n is a, c, g, or t
  misc_feature (1414)..(1414): n is a, c, g, or t
  misc_feature (1418)..(1418): n is a, c, g, or t
  misc_feature (1425)..(1425): n is a, c, g, or t
tagagagattactatgagaggatcgcatcaccctcaccatcacggatcctatttaggtgacactatagaatcgtcgacccacgcgtccgcccacgcgatccgggcgaagtgcgcgcgcgattgctccgggctctgcgcctggtgcggcggctgcgcggcctgagccaggccctgcgcgaggccgaagccgacggcgcggcctgggtcctgctgtactcccagaccgcgccgctgcgcgcggaactggccgagcggctacagccgttgacccaggctgcctatgtgggcgaggcgcggaggaggctggagagggtccggcgccgccggctgcggcttcgcgagagggcccgggaacgcgaggccgagcgggaggcagaggccgcgcgggcagtggaacgcgagcaggagattgaccgctggagggtgaagtgtgtgcaggaggtggaggagaagaagcgggagcaggaactcaaagcagccgctgatggcgtactatctgaagtgaggaaaaaacaagcagataccaaaagaatggtggacattctacgggctttggagaaattgaggaaactgaggaaagaggctgcagcgaggaaaggggtctgtcctccagcctcagcagatgagacttttacgcatcatcttcagcgactgagaaaactcattaaaaagcgctctgaactgtatgaagctgaanagagagccctcatagttatgctagaaggagaacaagaggaaagagaggaaaagagaattanaaaanaaaccttaataaaaaaattntanannaaattttantatatttntttnnaatanntnnccnaatnntttanaaancaaactnantnntaantttnaaaanatctaanttnaanncncattttcantntnantctatnaatctatanaaacnntnntntaatcttntntnctnnctntntncacatanncnatnannnattttttttctatatnatattcacnnatatntttctcccnttttatntcannaaaactancnctaaanntntaaanatntaatatnttttnnnctttccacacananattctctnaaaaaantnaccntanactttaannaaatttttantanncnctnntaatnnttattttcaaaanatnntcntanctnctcaatnntnttttattttaatnanaatnnntanantncaantttttattntnttttttacaanntttntcanacantataatanctatnntnnattncntnatcatanttatatatctaaatctnttattatanttnctanancaatcanntnntntncncntnaatattattanaanttctanttnatatcaatntctnnanttcnttttanatatcnatcnatnatcnacnattnctanntantttnnnatnantactantttntaacccn

SEQ ID NO: 45 - DNA, 1370 bp, Homo Sapiens
  misc_feature (1)..(1): n is a, c, g, or t
  misc_feature (898)..(898): n is a, c, g, or t
  misc_feature (923)..(923): n is a, c, g, or t
  misc_feature (979)..(979): n is a, c, g, or t
  misc_feature (994)..(994): n is a, c, g, or t
  misc_feature (1016)..(1016): n is a, c, g, or t
  misc_feature (1019)..(1019): n is a, c, g, or t
  misc_feature (1021)..(1021): n is a, c, g, or t
  misc_feature (1028)..(1028): n is a, c, g, or t
  misc_feature (1031)..(1031): n is a, c, g, or t
  misc_feature (1045)..(1045): n is a, c, g, or t
  misc_feature (1052)..(1052): n is a, c, g, or t
  misc_feature (1054)..(1054): n is a, c, g, or t
  misc_feature (1056)..(1056): n is a, c, g, or t
  misc_feature (1061)..(1061): n is a, c, g, or t
  misc_feature (1065)..(1065): n is a, c, g, or t
  misc_feature (1071)..(1072): n is a, c, g, or t
  misc_feature (1101)..(1101): n is a, c, g, or t
  misc_feature (1103)..(1104): n is a, c, g, or t
  misc_feature (1112)..(1112): n is a, c, g, or t
  misc_feature (1116)..(1116): n is a, c, g, or t
  misc_feature (1119)..(1119): n is a, c, g, or t
  misc_feature (1130)..(1130): n is a, c, g, or t
  misc_feature (1146)..(1146): n is a, c, g, or t
  misc_feature (1148)..(1148): n is a, c, g, or t
  misc_feature (1150)..(1151): n is a, c, g, or t
  misc_feature (1156)..(1156): n is a, c, g, or t
  misc_feature (1166)..(1166): n is a, c, g, or t
  misc_feature (1172)..(1172): n is a, c, g, or t
  misc_feature (1183)..(1183): n is a, c, g, or t
  misc_feature (1185)..(1186): n is a, c, g, or t
  misc_feature (1191)..(1191): n is a, c, g, or t
  misc_feature (1194)..(1194): n is a, c, g, or t
  misc_feature (1198)..(1198): n is a, c, g, or t
  misc_feature (1201)..(1201): n is a, c, g, or t
  misc_feature (1203)..(1203): n is a, c, g, or t
  misc_feature (1212)..(1214): n is a, c, g, or t
  misc_feature (1220)..(1221): n is a, c, g, or t
  misc_feature (1223)..(1224): n is a, c, g, or t
  misc_feature (1230)..(1230): n is a, c, g, or t
  misc_feature (1232)..(1232): n is a, c, g, or t
  misc_feature (1235)..(1235): n is a, c, g, or t
  misc_feature (1239)..(1240): n is a, c, g, or t
  misc_feature (1242)..(1242): n is a, c, g, or t
  misc_feature (1251)..(1252): n is a, c, g, or t
  misc_feature (1254)..(1255): n is a, c, g, or t
  misc_feature (1273)..(1273): n is a, c, g, or t
  misc_feature (1277)..(1278): n is a, c, g, or t
  misc_feature (1280)..(1280): n is a, c, g, or t
  misc_feature (1290)..(1291): n is a, c, g, or t
  misc_feature (1293)..(1293): n is a, c, g, or t
  misc_feature (1297)..(1297): n is a, c, g, or t
  misc_feature (1305)..(1305): n is a, c, g, or t
  misc_feature (1313)..(1315): n is a, c, g, or t
  misc_feature (1318)..(1319): n is a, c, g, or t
  misc_feature (1321)..(1321): n is a, c, g, or t
  misc_feature (1324)..(1324): n is a, c, g, or t
  misc_feature (1328)..(1328): n is a, c, g, or t
  misc_feature (1331)..(1333): n is a, c, g, or t
  misc_feature (1336)..(1336): n is a, c, g, or t
  misc_feature (1344)..(1345): n is a, c, g, or t
  misc_feature (1354)..(1354): n is a, c, g, or t
  misc_feature (1365)..(1368): n is a, c, g, or t
  misc_feature (1370)..(1370): n is a, c, g, or t
nttagagaaattactatgagaggatcgcatcaccatcaccatcacggatcctatttaggtgacactatagaatcgtcgacccacgcgtccgagcgcggcgctgggaggagctgctgcagcggggcgcggcgcagctggcggagctcgggccaccgggcgtggggggcgtcggggcctgcaagctcggtcccggcaagggctctcgcaagaagagcaaatctccaaaatgatggagctggccagagagaaacaggcggcagagctgaaggccctgaaggagacgtcggagaagtacgactgcctccctcccacacctgcttcgcctcccagcaagggctcagccgcacaaaacagctccttcatgcctgtctctctgcagcgacaccaaagagatgaagaaaaagctggagacaaagagactggagcggatccagggcatgaccaaagtcaccacagacaagatggcccaggagagatgacggagaacttggagaggcaccaggagaagctggaggagaagcaggcggcttgcctggaacagatacgggagatggaaaagcagttccagaaggaggcgctggcagagtacgaggccaggatgaagggtctggaggcagaggtgaaggagtcggtgagggcctgcctcaggacctgctttccctccgaggccaaggacaagcctgagagggcctgcgagtgccccccagagctgtgtgagcaggacccactcatagcaaaggcagatgcccaggagagccgcctctgatgcccccatcccactgggacatttagcaaggaggttcagccccttctctgggatgtggttctattcccccaggaaaaaggagccccagccttctgaggctgtgggaacctgtggctgccttggacgctgcanccccctcctcacggccaggccaaantctgaaacaggacccaggcacccttcacggcagggcctctcttggggcctaaaaantcttctcaagctganttcctacctccccctccatctntananaatgtcnatnttttgttgaaggcnaaaaatntngnatggnaagncaaaanngggatcttggccccctttgcctttctatnannaacaactntggnttntttctccctgnaggttggacccttccntncnntttancccaaccttntgcccngtttcagcccntnnggctnccnaatngcntntccctcttnnnaaatcnngnnttctcnantcntggnngncctcctggnnannccccctcctttcttttcnaaannantaaaaaaaanntntttncttttttnaaaaaggnnnggnntnggntttnccnnnggncccctttnnggggggggnttttttttctnnnntn

SEQ ID NO: 46 - DNA, 1200 bp, Homo Sapiens
  misc_feature (895)..(895): n is a, c, g, or t
  misc_feature (918)..(918): n is a, c, g, or t
  misc_feature (946)..(946): n is a, c, g, or t
  misc_feature (977)..(977): n is a, c, g, or t
  misc_feature (990)..(990): n is a, c, g, or t
  misc_feature (1010)..(1010): n is a, c, g, or t
  misc_feature (1012)..(1012): n is a, c, g, or t
  misc_feature (1015)..(1015): n is a, c, g, or t
  misc_feature (1027)..(1027): n is a, c, g, or t
  misc_feature (1035)..(1036): n is a, c, g, or t
  misc_feature (1049)..(1050): n is a, c, g, or t
  misc_feature (1054)..(1054): n is a, c, g, or t
  misc_feature (1059)..(1059): n is a, c, g, or t
  misc_feature (1063)..(1063): n is a, c, g, or t
  misc_feature (1071)..(1071): n is a, c, g, or t
  misc_feature (1074)..(1074): n is a, c, g, or t
  misc_feature (1085)..(1085): n is a, c, g, or t
  misc_feature (1088)..(1088): n is a, c, g, or t
  misc_feature (1098)..(1098): n is a, c, g, or t
  misc_feature (1108)..(1108): n is a, c, g, or t
  misc_feature (1114)..(1115): n is a, c, g, or t
  misc_feature (1127)..(1127): n is a, c, g, or t
  misc_feature (1130)..(1130): n is a, c, g, or t
  misc_feature (1137)..(1137): n is a, c, g, or t
  misc_feature (1140)..(1141): n is a, c, g, or t
  misc_feature (1149)..(1149): n is a, c, g, or t
  misc_feature (1154)..(1154): n is a, c, g, or t
  misc_feature (1173)..(1173): n is a, c, g, or t
  misc_feature (1182)..(1183): n is a, c, g, or t
  misc_feature (1191)..(1191): n is a, c, g, or t
  misc_feature (1194)..(1194): n is a, c, g, or t
tagagaaattactatgagaggatcgcatcaccatcaccatcacggaatcctatttaggtgacactatagaatcgtcgacccacgcgtccggtgtcatggaggcctacgagcaggtccaaaagggacccctgaagctgaaaggcgtcgcagagctgggagtgaccaagcggaagaagaaaaagaaggacaaagacaaagcgaaactcctggaagcaatgggaacgagcaaaaagaacgaggaggagaagcggcgcggcctggacaagcggaccccggcccaggcggccttcgagaaaatgcaggagaagcggcaaatggaaaggatcctaaagaaggcatccaaaacccacaagcagagagtggaggacttcaacagacacctggacacactcacggagcattacgacattcccaaagtcagctggacgaagtagccgcctgcccccagtatggagcagcatcgagggttcgcaaaaggccacactggggttgtgtgtgtttcctttggtatattctggaaacatggctacacacacccttgcatcttctgctacagactgcttttcgaagctgtgtaccctcattctggaacttgattaaagtaagatcgtccttgtactcagtttaggcttcttggcaacatacagaagatacacccttttcgtttggatggaaagtttctaagtttatccagaggtaaagcccattgtgtgtctgtgtcatgtaaaaatgttttcacccgagttgcatgtaacgctctgaggccagccagctgtcttctcctggatgagacagactccagagggtaaggagctagcgccatggtggcctgcagtatgcagagcccccgcaggacccagcgtgggcgcccttccagcttcctctagctttgggncctatgctgtcccctgcaggccntagggaaacccccttgcaactatgcggnctttcaaacttcctcctcagccacctggccnctgaaaacagccntagcctgggttaacggaaananccnccttaaggcaanaatggaannggaaccccccttnnctcnttttntgancccgtttnccnaaaaccccccnttncaggtgcttnttaagggggnttgccnntaacaaaacctnctnaatggcntcnnaacatttnttttnaaatggaaaccaaaaaaancctggcctnncattcctnaantggggg

SEQ ID NO: 47 - DNA, 256 bp, Homo Sapiens
  misc_feature (3)..(3): n is a, c, g, or t
  misc_feature (8)..(11): n is a, c, g, or t
  misc_feature (13)..(13): n is a, c, g, or t
  misc_feature (17)..(17): n is a, c, g, or t
  misc_feature (27)..(27): n is a, c, g, or t
ttnaaaannnntntaantccccaattnttaaagcaggagaaattaactatgagaggatcgcatcaccatcaccatcacggatcctatttaggtgacactatagaatcgtcgacccacgcgtccgcgacctacgcacacgagaacatgcctctcgcaaaggatctccttcatccctctccagaagaggagaagaggaaacacaagaagaaacgcctggtgcagagccccaattcctacttcatggatgtgaaatgcc

SEQ ID NO: 48 - DNA, 1326 bp, Homo Sapiens
  misc_feature (134)..(134): n is a, c, g, or t
  misc_feature (162)..(162): n is a, c, g, or t
  misc_feature (185)..(185): n is a, c, g, or t
  misc_feature (193)..(194): n is a, c, g, or t
  misc_feature (198)..(198): n is a, c, g, or t
  misc_feature (201)..(201): n is a, c, g, or t
  misc_feature (210)..(210): n is a, c, g, or t
  misc_feature (223)..(223): n is a, c, g, or t
  misc_feature (254)..(254): n is a, c, g, or t
  misc_feature (256)..(256): n is a, c, g, or t
  misc_feature (282)..(282): n is a, c, g, or t
  misc_feature (284)..(284): n is a, c, g, or t
  misc_feature (291)..(291): n is a, c, g, or t
  misc_feature (293)..(293): n is a, c, g, or t
  misc_feature (305)..(305): n is a, c, g, or t
  misc_feature (308)..(308): n is a, c, g, or t
  misc_feature (315)..(315): n is a, c, g, or t
  misc_feature (346)..(346): n is a, c, g, or t
  misc_feature (368)..(368): n is a, c, g, or t
  misc_feature (387)..(387): n is a, c, g, or t
  misc_feature (416)..(416): n is a, c, g, or t
  misc_feature (442)..(442): n is a, c, g, or t
  misc_feature (457)..(457): n is a, c, g, or t
  misc_feature (492)..(492): n is a, c, g, or t
  misc_feature (548)..(548): n is a, c, g, or t
  misc_feature (579)..(579): n is a, c, g, or t
  misc_feature (582)..(582): n is a, c, g, or t
  misc_feature (591)..(591): n is a, c, g, or t
  misc_feature (634)..(634): n is a, c, g, or t
  misc_feature (654)..(654): n is a, c, g, or t
  misc_feature (766)..(766): n is a, c, g, or t
  misc_feature (814)..(814): n is a, c, g, or t
  misc_feature (820)..(820): n is a, c, g, or t
  misc_feature (838)..(838): n is a, c, g, or t
  misc_feature (846)..(846): n is a, c, g, or t
  misc_feature (862)..(862): n is a, c, g, or t
  misc_feature (866)..(866): n is a, c, g, or t
  misc_feature (875)..(875): n is a, c, g, or t
  misc_feature (884)..(884): n is a, c, g, or t
  misc_feature (889)..(889): n is a, c, g, or t
  misc_feature (892)..(892): n is a, c, g, or t
  misc_feature (907)..(907): n is a, c, g, or t
  misc_feature (909)..(909): n is a, c, g, or t
  misc_feature (916)..(916): n is a, c, g, or t
  misc_feature (919)..(919): n is a, c, g, or t
  misc_feature (930)..(930): n is a, c, g, or t
  misc_feature (939)..(939): n is a, c, g, or t
  misc_feature (946)..(946): n is a, c, g, or t
  misc_feature (951)..(951): n is a, c, g, or t
  misc_feature (962)..(962): n is a, c, g, or t
  misc_feature (976)..(976): n is a, c, g, or t
  misc_feature (985)..(985): n is a, c, g, or t
  misc_feature (987)..(987): n is a, c, g, or t
  misc_feature (990)..(990): n is a, c, g, or t
  misc_feature (1013)..(1013): n is a, c, g, or t
  misc_feature (1015)..(1015): n is a, c, g, or t
  misc_feature (1017)..(1017): n is a, c, g, or t
  misc_feature (1025)..(1025): n is a, c, g, or t
  misc_feature (1028)..(1029): n is a, c, g, or t
  misc_feature (1037)..(1037): n is a, c, g, or t
  misc_feature (1042)..(1042): n is a, c, g, or t
  misc_feature (1044)..(1044): n is a, c, g, or t
  misc_feature (1051)..(1051): n is a, c, g, or t
  misc_feature (1058)..(1058): n is a, c, g, or t
  misc_feature (1078)..(1078): n is a, c, g, or t
  misc_feature (1083)..(1083): n is a, c, g, or t
  misc_feature (1085)..(1085): n is a, c, g, or t
  misc_feature (1091)..(1091): n is a, c, g, or t
  misc_feature (1094)..(1094): n is a, c, g, or t
  misc_feature (1107)..(1107): n is a, c, g, or t
  misc_feature (1111)..(1111): n is a, c, g, or t
  misc_feature (1130)..(1130): n is a, c, g, or t
  misc_feature (1132)..(1132): n is a, c, g, or t
  misc_feature (1136)..(1136): n is a, c, g, or t
  misc_feature (1143)..(1143): n is a, c, g, or t
  misc_feature (1148)..(1148): n is a, c, g, or t
  misc_feature (1155)..(1156): n is a, c, g, or t
  misc_feature (1158)..(1158): n is a, c, g, or t
  misc_feature (1162)..(1164): n is a, c, g, or t
  misc_feature (1168)..(1168): n is a, c, g, or t
  misc_feature (1170)..(1170): n is a, c, g, or t
  misc_feature (1177)..(1177): n is a, c, g, or t
  misc_feature (1182)..(1182): n is a, c, g, or t
  misc_feature (1186)..(1186): n is a, c, g, or t
  misc_feature (1190)..(1190): n is a, c, g, or t
  misc_feature (1192)..(1192): n is a, c, g, or t
  misc_feature (1197)..(1199): n is a, c, g, or t
  misc_feature (1203)..(1203): n is a, c, g, or t
  misc_feature (1207)..(1207): n is a, c, g, or t
  misc_feature (1212)..(1212): n is a, c, g, or t
  misc_feature (1215)..(1215): n is a, c, g, or t
  misc_feature (1220)..(1220): n is a, c, g, or t
  misc_feature (1222)..(1222): n is a, c, g, or t
  misc_feature (1225)..(1226): n is a, c, g, or t
  misc_feature (1228)..(1229): n is a, c, g, or t
  misc_feature (1232)..(1237): n is a, c, g, or t
  misc_feature (1240)..(1240): n is a, c, g, or t
  misc_feature (1245)..(1245): n is a, c, g, or t
  misc_feature (1248)..(1248): n is a, c, g, or t
  misc_feature (1252)..(1252): n is a, c, g, or t
  misc_feature (1256)..(1256): n is a, c, g, or t
  misc_feature (1259)..(1261): n is a, c, g, or t
  misc_feature (1263)..(1263): n is a, c, g, or t
  misc_feature (1267)..(1268): n is a, c, g, or t
  misc_feature (1271)..(1271): n is a, c, g, or t
  misc_feature (1276)..(1285): n is a, c, g, or t
  misc_feature (1287)..(1292): n is a, c, g, or t
  misc_feature (1294)..(1295): n is a, c, g, or t
  misc_feature (1299)..(1326): n is a, c, g, or t
tagagaaattactatgagaggatcgcatcaccatcaccatcacggatcctatttaggtgacactatagaatcgtcgacccacgcgtccggcaaacgtgttgctcttaccatcgccttgttccacgatagctggnaaggtcttcattcacttgccactgctantcttccaacccttctggactttntttgctcnngtcntgnttggggtgnactggatcatganacttctttttcttggcactaccggcagtccngntcagaatgagcaaggctttgtggagntnaaaattncngggcctctgcantanatgtggnggtaccatgtggtgggcctgatttggatcantgaatttattctagcatgtcancagatgacagtggcagganctgtggtaacatactattttactaggganaaaaggaatttgccatttacacctantttggcatcagatanatcgccttattcgttaccacctaggtacggtggcnaaaggatctttcattatcacattagtcaaaattccgcgaatgatccttatgtatantcacagtcagctcaaaggaaaggaaaatgcntgngcacgatgngtgctgaaatcttgcaattgttgcctttggtgtcttgaaaagngcctaaattatttaaatcanaatgcatacacagccacagctatcaacagcaccaacttctgcacctcagcaaaggatgcctttgtcattctggtggagaatgctttgcgagtggctaccatcaacacagtangagattttatgttattccttggcaaggtgctgatagtctgcagcacangtttanctgggattatgctgctcnactaccancaggactacacagtangggngctgcctcngatcatcgnctgcntcnttgctttcctaggcncncattgcntcntggctatttangaaaagggnaggggangcatnattcctggggntttgccatggaaanaaaaaaacnanganggaagccccgggcaaaaaattcnananggaaaacnggnngaaggagnttggngnaaaaccnaagaaanccatgaaaaaaactggtaanggagncncccctnatnccaaaaacaaaanccancctaaaaaaaagggactgncncctnaaccctnaaaangaacccnnanaggnnnttancnggggttnccccncccnaatntnaaaannnccantttnaaaanggnttttntnttnnannaannnnnnaanttttnaancccnaaanccnnngntttnnaanggggnnnnnnnnnntnnnnnncnnaaannnnnnnnnnnnnnnnnnnnnnnnnnnn

SEQ ID NO: 49 - DNA, 256 bp, Homo Sapiens
  misc_feature (1)..(3): n is a, c, g, or t
  misc_feature (6)..(6): n is a, c, g, or t
nnnctntgagaggatcgcatcaccatcaccatcacggatcctatttaggtgacactatagaatcgtcgacccacgcgtccggcactcctgaaccggataccagcactgtaccccaggatgctgccaccatccccagctcagccatgcaggccccaacagtttgtatctacttgaacaagaatggcagcacaggcccccacttagataagaagaaggtccagcaactccctgaccattttggaccagcccgtgcctc

SEQ ID NO: 50 - DNA, 1395 bp, Homo Sapiens
  misc_feature (842)..(842): n is a, c, g, or t
  misc_feature (865)..(865): n is a, c, g, or t
  misc_feature (868)..(868): n is a, c, g, or t
  misc_feature (871)..(871): n is a, c, g, or t
  misc_feature (877)..(877): n is a, c, g, or t
  misc_feature (879)..(879): n is a, c, g, or t
  misc_feature (899)..(899): n is a, c, g, or t
  misc_feature (933)..(933): n is a, c, g, or t
  misc_feature (940)..(940): n is a, c, g, or t
  misc_feature (949)..(949): n is a, c, g, or t
  misc_feature (953)..(953): n is a, c, g, or t
  misc_feature (955)..(955): n is a, c, g, or t
  misc_feature (957)..(957): n is a, c, g, or t
  misc_feature (993)..(993): n is a, c, g, or t
  misc_feature (995)..(995): n is a, c, g, or t
  misc_feature (999)..(999): n is a, c, g, or t
  misc_feature (1001)..(1001): n is a, c, g, or t
  misc_feature (1003)..(1004): n is a, c, g, or t
  misc_feature (1021)..(1021): n is a, c, g, or t
  misc_feature (1023)..(1023): n is a, c, g, or t
  misc_feature (1026)..(1027): n is a, c, g, or t
  misc_feature (1037)..(1038): n is a, c, g, or t
  misc_feature (1058)..(1058): n is a, c, g, or t
  misc_feature (1066)..(1066): n is a, c, g, or t
  misc_feature (1072)..(1072): n is a, c, g, or t
  misc_feature (1081)..(1081): n is a, c, g, or t
  misc_feature (1094)..(1094): n is a, c, g, or t
  misc_feature (1097)..(1097): n is a, c, g, or t
  misc_feature (1113)..(1113): n is a, c, g, or t
  misc_feature (1125)..(1125): n is a, c, g, or t
  misc_feature (1130)..(1130): n is a, c, g, or t
  misc_feature (1132)..(1133): n is a, c, g, or t
  misc_feature (1148)..(1148): n is a, c, g, or t
  misc_feature (1150)..(1150): n is a, c, g, or t
  misc_feature (1153)..(1153): n is a, c, g, or t
  misc_feature (1155)..(1156): n is a, c, g, or t
  misc_feature (1160)..(1160): n is a, c, g, or t
  misc_feature (1169)..(1169): n is a, c, g, or t
  misc_feature (1179)..(1179): n is a, c, g, or t
  misc_feature (1203)..(1203): n is a, c, g, or t
  misc_feature (1209)..(1209): n is a, c, g, or t
  misc_feature (1213)..(1213): n is a, c, g, or t
  misc_feature (1215)..(1215): n is a, c, g, or t
  misc_feature (1223)..(1223): n is a, c, g, or t
  misc_feature (1229)..(1229): n is a, c, g, or t
  misc_feature (1235)..(1235): n is a, c, g, or t
  misc_feature (1240)..(1240): n is a, c, g, or t
  misc_feature (1242)..(1242): n is a, c, g, or t
  misc_feature (1245)..(1245): n is a, c, g, or t
  misc_feature (1252)..(1252): n is a, c, g, or t
  misc_feature (1257)..(1257): n is a, c, g, or t
  misc_feature (1264)..(1264): n is a, c, g, or t
  misc_feature (1267)..(1267): n is a, c, g, or t
  misc_feature (1270)..(1270): n is a, c, g, or t
  misc_feature (1274)..(1275): n is a, c, g, or t
  misc_feature (1278)..(1278): n is a, c, g, or t
  misc_feature (1287)..(1287): n is a, c, g, or t
  misc_feature (1289)..(1290): n is a, c, g, or t
  misc_feature (1297)..(1297): n is a, c, g, or t
  misc_feature (1323)..(1323): n is a, c, g, or t
  misc_feature (1344)..(1344): n is a, c, g, or t
  misc_feature (1347)..(1347): n is a, c, g, or t
  misc_feature (1349)..(1350): n is a, c, g, or t
  misc_feature (1377)..(1378): n is a, c, g, or t
  misc_feature (1384)..(1384): n is a, c, g, or t
  misc_feature (1390)..(1390): n is a, c, g, or t
tagaggaaattactatggagaggatcgcatcaccattcaccatcacggatcctatttaggtgacactatagaatcgtcgacccacgcgtccgaaaagatggttgctgcctccatcaaagatggagaggctgtgtggtttggctgtgatgttggaaaacacttcaatagcaagctgggcctcagtgacatgaatctctatgaccatgagttagtgtttggtgtctccttgaagaacatgaataaagcggagaggctgacttttggtgagtcacttatgacccacgccatgaccttcactgctgtctcagagaaggatgatcaggatggtgctttcacaaaatggagagtggagaattcatggggtgaagaccatggccacaaaggttacctgtgcatgacagatgagtggttctctgagtatgtctacgaagtggtggtggacaggaagcatgtccctgaagaggtgctagctgtgttagagcaggaacccattgtcctgccagcatgggaccccatgggagctttggctgagtgatactgccctccagctctttcctccttccatggaacctgacgtagctgcaaaggacagatccagggactgaagccaaagttatgcaagggactgtgtgttgccacaggacacagtcagatttccagtctccaccaggaacctcttcagaaagtgtgctttatgctgaaacagaatactgttaaaggaaaaaaaagaggggggaagatcaggtcatactatctactctcctcatctctaacagctcaggatctcttagcatttttaattagatgtaattgtttgtcttttaactgtcaaaaagtttggnttctgtgtctgtgttttaataanacnaanaggacnancgattgaaggtgtatggaanaaaaaacaaacctaatgctcccttgttcctaaantaaaaanggaaggganggtngncntaaaaattaacctctcgaaactgcctgctgctgganantaancntnntcctttcctaaatggcnantcnntgaaatcccnntttttttcaagggaaatttnttgggccncctaanaaccccaanaaatggaaggttnaancaaaactgacatgaantccttcccgttncgaancnngggggggcccctccncngcntnnaacncaggtttgnaaaaagcctnaaaaaaatttggggaaaaaaaccnaaaacnttancngggccccnccaaanctttanggggnanccnccccaanggttnattttcnccnttnaaannggnattgggggncnnaaaaaanaaaacccctttttttctaaaaaaaangggcccaaaatttttaaaaanttncnnaaaaaaaaaaaaaaagggggccccccnnaagggnctaaanttttt

SEQ ID NO: 51 - DNA, 871 bp, Homo Sapiens
  misc_feature (793)..(793): n is a, c, g, or t
  misc_feature (798)..(802): n is a, c, g, or t
  misc_feature (808)..(860): n is a, c, g, or t
  misc_feature (871)..(871): n is a, c, g, or t
tagagaaattactatgagaggatcgcatcaccatcaccatcacggatcctatttaggtgacactatagaatcgtcgacccacgcgtccgctgtagccggaccctttgccttcgccactgctcagcgtctgcacatccctacaatggctaaaacagcaatggcctacaaggaaaaaatgaaggagctgtccatgctgtcactgatctgctcttgcttttacccggaacctcgcaacatcaacatctatacttacgatgatatggaagtgaagcaaatcaacaaacgtgcctctggccaggcttttgagctgatcttgaagccaccatctcctatctcagaagccccacgaactttagcttctccaaagaagaaagacctgtccctggaggagatccagaagaaactggaggctgcagaggaaagaagaaagtctcaggaggcccaggtgctgaaacaattggcagagaagagggaacacgagcgagaagtccttcagaaggctttggaggagaacaacaacttcagcaagatggcggaggaaaagctgatcctgaaaatggaacaaattaaggaaaaccgtgaggctaatctagctgctattattgaacgtctgcaggaaaaggagaggcatgctgcggaggtgcgcaggaacaaggaactccaggttgaactgtctggctgaagcaagggagggtctggcacgccccaccaatagtaaatccccctgcctatattataatggatcatgcgatatcaggatggggaatgtatgacatggtttaaaaagaactcnttatnnnnnaaaaannnnnnnnnnnnnnnnnnnnnnnnnnnnnnnnnnnnnnnnnnnnnnnnnnnnnggggggccgcn

SEQ ID NO: 52 - DNA, 1200 bp, Homo Sapiens
  misc_feature (866)..(866): n is a, c, g, or t
  misc_feature (929)..(929): n is a, c, g, or t
  misc_feature (938)..(938): n is a, c, g, or t
  misc_feature (941)..(941): n is a, c, g, or t
  misc_feature (954)..(954): n is a, c, g, or t
  misc_feature (965)..(965): n is a, c, g, or t
  misc_feature (969)..(969): n is a, c, g, or t
  misc_feature (992)..(992): n is a, c, g, or t
  misc_feature (1016)..(1016): n is a, c, g, or t
  misc_feature (1018)..(1018): n is a, c, g, or t
  misc_feature (1021)..(1021): n is a, c, g, or t
  misc_feature (1024)..(1024): n is a, c, g, or t
  misc_feature (1057)..(1057): n is a, c, g, or t
  misc_feature (1066)..(1066): n is a, c, g, or t
  misc_feature (1078)..(1078): n is a, c, g, or t
  misc_feature (1093)..(1093): n is a, c, g, or t
  misc_feature (1107)..(1107): n is a, c, g, or t
  misc_feature (1119)..(1120): n is a, c, g, or t
  misc_feature (1135)..(1135): n is a, c, g, or t
  misc_feature (1137)..(1138): n is a, c, g, or t
  misc_feature (1182)..(1184): n is a, c, g, or t
  misc_feature (1188)..(1189): n is a, c, g, or t
  misc_feature (1193)..(1193): n is a, c, g, or t
tagagaaattactatgagaggatcgcatcaccatcaccatcacggatcctatttaggtgacactatagaatcgtcgacccacgcgtccgcggaggactgcaggggcctgagccgctgctgccgccgccgccgcgcagccccacatcaacgcaccggggtcctgtcaccgccaccgccaaaaaagtcaccgccgctagggtcgccgttgcatcggtgcagggcaagatggcatccgccacagactcgcgctatgggcagaaggagtcctcggatcagaacttcgactacatgttcaagattctcatcatcggcaacagcagcgtgggcaagacgtccttcctcttccgctatgctgacgactcgttcacgcctgccttcgtcagcaccgtgggcatcgacttcaaggtcaagaccatctatcgcaacgacaagaggatcaagctgcagatctgggacacagcagggcaagagcggtaccggaccatcaccaccgcatactaccggggcgctatgggcttcatcctcatgtatgacatcaccaacgaggaatccttcaatgcagtgcaggactggtccacccagatcaagacctactcatgggacaatgcccaggtgctgctggtaggaaacaagtgtgacatggaggatgagcgggtggtgtcatcagaacgtggccggcagctagctgaccaccttgggttcgagttctttgaggcaagcgccaaggacaacattaacgtcaagcagacctttgagcgcctggtggatgtcatctgcgagaagatgtccgagtcgttggacacggcggaccctgcggtcacaggcgccaagcagggcccacagctcagtgaccagcaggtgccacngcaccaggactgcgcctgctgagagccatcccactccctttcccctcttcctgtcttcccacnttccccaantanccgggcctgaccnggcccctacanccangggcaaaaaaccctgctcctgantaacccgtccccttatttttatgnanctnttntttatttattgaaaattcccccaggggccaggntccctggcngcccaagcctgnccctctgtaaataanccctttcccatcanctggggggttcnnggcccgtaaatcccntnncctctgaaccccccccgcttttttaaaatcccccctccaatttnnntttnnaaanggccaaa

SEQ ID NO: 53 - DNA, 1384 bp, Homo Sapiens
  misc_feature (896)..(896): n is a, c, g, or t
  misc_feature (915)..(915): n is a, c, g, or t
  misc_feature (1010)..(1010): n is a, c, g, or t
  misc_feature (1015)..(1015): n is a, c, g, or t
  misc_feature (1018)..(1019): n is a, c, g, or t
  misc_feature (1026)..(1026): n is a, c, g, or t
  misc_feature (1028)..(1028): n is a, c, g, or t
  misc_feature (1031)..(1031): n is a, c, g, or t
  misc_feature (1044)..(1045): n is a, c, g, or t
  misc_feature (1047)..(1049): n is a, c, g, or t
  misc_feature (1051)..(1051): n is a, c, g, or t
  misc_feature (1059)..(1081): n is a, c, g, or t
  misc_feature (1094)..(1094): n is a, c, g, or t
  misc_feature (1103)..(1103): n is a, c, g, or t
  misc_feature (1107)..(1107): n is a, c, g, or t
  misc_feature (1115)..(1115): n is a, c, g, or t
  misc_feature (1127)..(1128): n is a, c, g, or t
  misc_feature (1135)..(1135): n is a, c, g, or t
  misc_feature (1137)..(1138): n is a, c, g, or t
  misc_feature (1140)..(1141): n is a, c, g, or t
  misc_feature (1145)..(1145): n is a, c, g, or t
  misc_feature (1155)..(1155): n is a, c, g, or t
  misc_feature (1157)..(1157): n is a, c, g, or t
  misc_feature (1160)..(1160): n is a, c, g, or t
  misc_feature (1163)..(1163): n is a, c, g, or t
  misc_feature (1169)..(1169): n is a, c, g, or t
  misc_feature (1197)..(1198): n is a, c, g, or t
  misc_feature (1203)..(1204): n is a, c, g, or t
  misc_feature (1210)..(1210): n is a, c, g, or t
  misc_feature (1212)..(1212): n is a, c, g, or t
  misc_feature (1215)..(1215): n is a, c, g, or t
  misc_feature (1217)..(1218): n is a, c, g, or t
  misc_feature (1220)..(1220): n is a, c, g, or t
  misc_feature (1223)..(1223): n is a, c, g, or t
  misc_feature (1226)..(1226): n is a, c, g, or t
  misc_feature (1233)..(1233): n is a, c, g, or t
  misc_feature (1237)..(1237): n is a, c, g, or t
  misc_feature (1242)..(1243): n is a, c, g, or t
  misc_feature (1250)..(1250): n is a, c, g, or t
  misc_feature (1252)..(1252): n is a, c, g, or t
  misc_feature (1263)..(1263): n is a, c, g, or t
  misc_feature (1271)..(1273): n is a, c, g, or t
  misc_feature (1275)..(1276): n is a, c, g, or t
  misc_feature (1278)..(1278): n is a, c, g, or t
  misc_feature (1284)..(1285): n is a, c, g, or t
  misc_feature (1287)..(1288): n is a, c, g, or t
  misc_feature (1290)..(1290): n is a, c, g, or t
  misc_feature (1295)..(1296): n is a, c, g, or t
  misc_feature (1311)..(1313): n is a, c, g, or t
  misc_feature (1327)..(1327): n is a, c, g, or t
  misc_feature (1331)..(1332): n is a, c, g, or t
  misc_feature (1337)..(1337): n is a, c, g, or t
  misc_feature (1341)..(1343): n is a, c, g, or t
  misc_feature (1346)..(1346): n is a, c, g, or t
  misc_feature (1351)..(1351): n is a, c, g, or t
  misc_feature (1353)..(1353): n is a, c, g, or t
  misc_feature (1355)..(1355): n is a, c, g, or t
  misc_feature (1358)..(1358): n is a, c, g, or t
  misc_feature (1361)..(1362): n is a, c, g, or t
  misc_feature (1364)..(1364): n is a, c, g, or t
  misc_feature (1366)..(1366): n is a, c, g, or t
  misc_feature (1369)..(1369): n is a, c, g, or t
  misc_feature (1374)..(1375): n is a, c, g, or t
  misc_feature (1381)..(1381): n is a, c, g, or t
  misc_feature (1383)..(1384): n is a, c, g, or t
tagagagattactatgagaggatcgcatcaccatcaccatcacggatcctatttaggtgacactatagaatcgtcgacccacgcgtccgatgaaatacaagatgacagcagtgatttgcatttagtgactttggatgaagtaactgaagaggatgaagactctctggcggattttaacaaccttaaagaagagcttaattttgttactgttgatgaagttggagaggaggaagatggagataatgatttaaaagttgagttagcacaaagcaaaaatgaccatcccacagataaaaaagggaatagaaagaagagagctgtggacacaaaaaagacaaaacttgaatccttgtcccaagtgggtccagtaaatgagaatgttatggaagaagatctaaaaaccatgattgaaagacacttaacagctaaaactccaaccaagagagttagaattgggaaaactctgccatcagaaaaagctgttgtgacagaaccagcaaaaggtgaagaggccttccagatgagtgaagttgatgaggaatctggattaaaggattcagaaccagagcgaaaacgcaagaagactgaagactcttcttcaggcaaatcagtggcgtctgatgtccctgaggaattagactttcttgtacctaaggctggattcttctgtccaatttgttccctcttctactcaggtgaaaaagcaatgacaaatcactgcaagagtacacgtcataagcaaaatactgagaaattcatggccaagcaaagaaaggaaaaggagcagaatgaggctgaagaaagaagctctaggtgattgggggaaaggaaagaattcactagaaatttgtttagggtccagttgatttgtgtatttttgttatcatttaatttgnaattttccgtttcaaaacnaatattcgtgttgtacaaatttctgatgccctaaatgtaaagagactgatggggaaagtatgatgggtttgatttttatatccaatcctccggcntgganaanntctttanantgntaaataatgtccnncnnntntttaaatnnnnnnnnnnnnnnnnnnnnnnngggcgcccccccnaaggggccnatancttaattncgacctggcccnntgaaaancnnanncccncaaccccccngnttntcnaacccngtgccccgggtttttttgggaaaccccnncctgnnatttcngnccngnncnaanggnaaaaccngganccccnnaatcccngncccaaaaattnggtttccnnncnngnccaacnncnncnggatnnctttaccaaaaaaannntttcccctttcttncccnnccccntttnnnaanggggngntnccnttnntnanaanttccnnaaaatncnn

SEQ ID NO: 54 - DNA, 1190 bp, Homo Sapiens
  misc_feature (893)..(893): n is a, c, g, or t
  misc_feature (906)..(907): n is a, c, g, or t
  misc_feature (932)..(932): n is a, c, g, or t
  misc_feature (951)..(951): n is a, c, g, or t
  misc_feature (971)..(971): n is a, c, g, or t
  misc_feature (986)..(986): n is a, c, g, or t
  misc_feature (988)..(988): n is a, c, g, or t
  misc_feature (1002)..(1002): n is a, c, g, or t
  misc_feature (1009)..(1009): n is a, c, g, or t
  misc_feature (1032)..(1032): n is a, c, g, or t
  misc_feature (1036)..(1036): n is a, c, g, or t
  misc_feature (1039)..(1039): n is a, c, g, or t
  misc_feature (1047)..(1047): n is a, c, g, or t
  misc_feature (1055)..(1055): n is a, c, g, or t
  misc_feature (1062)..(1062): n is a, c, g, or t
  misc_feature (1071)..(1071): n is a, c, g, or t
  misc_feature (1073)..(1073): n is a, c, g, or t
  misc_feature (1076)..(1076): n is a, c, g, or t
  misc_feature (1080)..(1080): n is a, c, g, or t
  misc_feature (1084)..(1086): n is a, c, g, or t
  misc_feature (1110)..(1110): n is a, c, g, or t
  misc_feature (1122)..(1122): n is a, c, g, or t
  misc_feature (1126)..(1126): n is a, c, g, or t
  misc_feature (1130)..(1130): n is a, c, g, or t
  misc_feature (1135)..(1135): n is a, c, g, or t
  misc_feature (1140)..(1140): n is a, c, g, or t
  misc_feature (1142)..(1142): n is a, c, g, or t
  misc_feature (1146)..(1146): n is a, c, g, or t
  misc_feature (1154)..(1154): n is a, c, g, or t
  misc_feature (1159)..(1159): n is a, c, g, or t
  misc_feature (1168)..(1168): n is a, c, g, or t
  misc_feature (1172)..(1172): n is a, c, g, or t
  misc_feature (1176)..(1176): n is a, c, g, or t
  misc_feature (1187)..(1187): n is a, c, g, or t
tagagaaattactatgagaggatcgcatcaccatcaccatcacggatcctatttaggtgacactatagaatcgtcgacccacgcgtccgcccacgcgtccgcagagatggagttctcttcacttcaggacatgcccaaggagctggatccctctgctgtgctccccttagactgtctgcttgcttttgtgttctttgatgccaactggtgtggctacttgcaccggcgagacttagagaggatcctccttacccttgggatccggctcagtgcagagcaggccaagcagctggtcagcagggtggtgacccagaacatctgccagtaccggagccttcagtacagccgccaggagggcctggatggtggccttcccgaggaggtgctcttcggaaacctggacctgctgccccctcctgggaaaagcacgaagccaggtgctgcccccacagaacacaaagccttggtgtcccacaatggcagcctgattaacgtggggagcctgctgcagcgcgcggagcagcaggacagcggccggctctacctagagaacaagatccacacactggagctgaagctggaggagagccataaccgtttctcagccactgaagtaaccaataagacgctggcggcagagatgcaggagctgcgagtccggctggcggaggccgaggagaccgcccggacggcggagcgacagaagagccagctccagcggctgctgcaggagctccgcaggcgtctgacccccctgcagctggagattcagcggggtggtggaaaaggctgacagctgggtggagaaggaggagccggcacctagcaactgacggcctcgcacggaactgccatcctgtgagggcagcggtggcgccccggcaaagttggancccttgcggtacnnaaagcagcgagagcgaaactggganccaggcaggggtggctgancccatgctcacctctagggnaggcaggccattcangntgggggctggcttnttggaanggatgtttgaagaacccggttcncttnaanacttaaanaaaacatnttttgcncccctaaangntcntttngccnnnaacctgggaatttcccgggggccntttaacctgggnggantttnccggnccctncngttnaaaaaaanagggnaaaaaaggntttncaanggggaaaagtntat

SEQ ID NO: 55 - DNA, 256 bp, Homo Sapiens
tagagaaattaactatgagaggatcgcatcaccatcaccatcacggatcctatttaggtgacactatagaatcgtcgacccacgcgtccgcccacgcgtccggtctttgtgtgtgtatgtgtgatctctgcctgcaggaccagcccggtggcaccctggatctgaccctgatccgtgcccgcctccaggagaagttgtcacctccctacagctccccacaggagtttgcccaggatgtgggccgcatgttcaagca

SEQ ID NO: 56 - DNA, 1238 bp, Homo Sapiens
  misc_feature (922)..(922): n is a, c, g, or t
  misc_feature (954)..(954): n is a, c, g, or t
  misc_feature (979)..(979): n is a, c, g, or t
  misc_feature (990)..(990): n is a, c, g, or t
  misc_feature (996)..(996): n is a, c, g, or t
  misc_feature (1010)..(1010): n is a, c, g, or t
  misc_feature (1022)..(1022): n is a, c, g, or t
  misc_feature (1056)..(1056): n is a, c, g, or t
  misc_feature (1060)..(1062): n is a, c, g, or t
  misc_feature (1065)..(1065): n is a, c, g, or t
  misc_feature (1067)..(1067): n is a, c, g, or t
  misc_feature (1069)..(1069): n is a, c, g, or t
  misc_feature (1083)..(1083): n is a, c, g, or t
  misc_feature (1085)..(1085): n is a, c, g, or t
  misc_feature (1121)..(1121): n is a, c, g, or t
  misc_feature (1146)..(1146): n is a, c, g, or t
  misc_feature (1163)..(1163): n is a, c, g, or t
  misc_feature (1169)..(1169): n is a, c, g, or t
  misc_feature (1171)..(1171): n is a, c, g, or t
  misc_feature (1187)..(1187): n is a, c, g, or t
  misc_feature (1195)..(1196): n is a, c, g, or t
  misc_feature (1199)..(1200): n is a, c, g, or t
  misc_feature (1203)..(1203): n is a, c, g, or t
  misc_feature (1208)..(1208): n is a, c, g, or t
  misc_feature (1214)..(1215): n is a, c, g, or t
  misc_feature (1229)..(1229): n is a, c, g, or t
tagagaaattactatgaagaggatcgcatcaccatcaccatcacggatcctatttaggtgacactatagaatcgtcgacccacgcgtccgcggcgccgccgcagatcccggacacccggcgggagctggcggagctcgtgaagcggaagcaggagctggcggaaacattggcaaatttggagcgacagatctatgcttttgagggaagctacctggaagacactcagatgtatggcaatattattcgtggctgggatcggtatctgaccaaccaaaaaaactccaatagcaaaaatgatcgaaggaaccggaagtttaaggaagctgagcggctcttcagtaaatcctcggttacctcagcagctgcagtaagtgcattggcaggagttcaggaccagctcattgaaaagagggagccaggaagtgggacggaaagtgacacttctccagacttccacaatcaggaaaatgagcccagccaggaggaccctgaggatctggatggatctgtgcagggagtgaaacctcagaaggctgcttcttctacttcctcagggagtcaccacagcagccataaaaagcgaaagaataaaaaccggcacagcccgtctggcatgtttgattatgactttgagattgatctgaagttaaacaaaaaaccacgagctgactattagaagacacattagtgcagaagcttccaggctgtagagccctgcttcccttctctgacctcacaaagataaacatccttcacctgagttcgtggccatccacctctgctctcccagacccagtgcctgtgactttgagtagtttgttctaaatgtggtgacaaacaagtcatttctgtaagacattgggtcttactttatgtcatttttagtaacagaactgcaggaagatcaagacaatgttgtantcccggcaagttgctaactgtgcgtttctccntcttagatgaatgtctcccccaaantggctggcccngcttcntctgtgataccctncaaaaatgttcnctgggttttgtttttggctgaaagtaaaacccangtcnnnttncnanggaggctgaaaaancnggcattttcctaaatgggtttaggtttctgggtttnccctgggggttttaccctaatttcnttgggggttttttgaangccttngnacgcccaactttccgnggaaattnnganntcntttcnggggtnncaatttcttaatgnaaaaatcgg

SEQ ID NO: 57 - DNA, 1340 bp, Homo Sapiens
  misc_feature (654)..(654): n is a, c, g, or t
  misc_feature (839)..(839): n is a, c, g, or t
  misc_feature (850)..(850): n is a, c, g, or t
  misc_feature (860)..(860): n is a, c, g, or t
  misc_feature (905)..(905): n is a, c, g, or t
  misc_feature (927)..(927): n is a, c, g, or t
  misc_feature (930)..(930): n is a, c, g, or t
  misc_feature (932)..(932): n is a, c, g, or t
  misc_feature (942)..(942): n is a, c, g, or t
  misc_feature (944)..(944): n is a, c, g, or t
  misc_feature (950)..(951): n is a, c, g, or t
  misc_feature (972)..(972): n is a, c, g, or t
  misc_feature (975)..(975): n is a, c, g, or t
  misc_feature (977)..(978): n is a, c, g, or t
  misc_feature (981)..(981): n is a, c, g, or t
  misc_feature (987)..(987): n is a, c, g, or t
  misc_feature (998)..(998): n is a, c, g, or t
  misc_feature (1003)..(1003): n is a, c, g, or t
  misc_feature (1012)..(1012): n is a, c, g, or t
  misc_feature (1027)..(1027): n is a, c, g, or t
  misc_feature (1041)..(1041): n is a, c, g, or t
  misc_feature (1045)..(1045): n is a, c, g, or t
  misc_feature (1047)..(1049): n is a, c, g, or t
  misc_feature (1051)..(1051): n is a, c, g, or t
  misc_feature (1055)..(1055): n is a, c, g, or t
  misc_feature (1058)..(1058): n is a, c, g, or t
  misc_feature (1067)..(1068): n is a, c, g, or t
  misc_feature (1073)..(1075): n is a, c, g, or t
  misc_feature (1078)..(1078): n is a, c, g, or t
  misc_feature (1085)..(1085): n is a, c, g, or t
  misc_feature (1088)..(1088): n is a, c, g, or t
  misc_feature (1090)..(1090): n is a, c, g, or t
  misc_feature (1092)..(1093): n is a, c, g, or t
  misc_feature (1102)..(1103): n is a, c, g, or t
  misc_feature (1105)..(1107): n is a, c, g, or t
  misc_feature (1110)..(1110): n is a, c, g, or t
  misc_feature (1112)..(1112): n is a, c, g, or t
  misc_feature (1114)..(1114): n is a, c, g, or t
  misc_feature (1119)..(1119): n is a, c, g, or t
  misc_feature (1124)..(1126): n is a, c, g, or t
  misc_feature (1128)..(1128): n is a, c, g, or t
  misc_feature (1131)..(1131): n is a, c, g, or t
  misc_feature (1133)..(1133): n is a, c, g, or t
  misc_feature (1136)..(1136): n is a, c, g, or t
  misc_feature (1143)..(1143): n is a, c, g, or t
  misc_feature (1146)..(1149): n is a, c, g, or t
  misc_feature (1154)..(1154): n is a, c, g, or t
  misc_feature (1164)..(1168): n is a, c, g, or t
  misc_feature (1170)..(1171): n is a, c, g, or t
  misc_feature (1174)..(1177): n is a, c, g, or t
  misc_feature (1184)..(1184): n is a, c, g, or t
  misc_feature (1187)..(1188): n is a, c, g, or t
  misc_feature (1190)..(1193): n is a, c, g, or t
  misc_feature (1198)..(1198): n is a, c, g, or t
  misc_feature (1206)..(1207): n is a, c, g, or t
  misc_feature (1210)..(1210): n is a, c, g, or t
  misc_feature (1214)..(1215): n is a, c, g, or t
  misc_feature (1217)..(1217): n is a, c, g, or t
  misc_feature (1225)..(1226): n is a, c, g, or t
  misc_feature (1232)..(1232): n is a, c, g, or t
  misc_feature (1235)..(1235): n is a, c, g, or t
  misc_feature (1238)..(1239): n is a, c, g, or t
  misc_feature (1241)..(1241): n is a, c, g, or t
  misc_feature (1243)..(1248): n is a, c, g, or t
  misc_feature (1250)..(1252): n is a, c, g, or t
  misc_feature (1254)..(1254): n is a, c, g, or t
  misc_feature (1259)..(1259): n is a, c, g, or t
  misc_feature (1262)..(1263): n is a, c, g, or t
  misc_feature (1266)..(1303): n is a, c, g, or t
  misc_feature (1308)..(1312): n is a, c, g, or t
  misc_feature (1316)..(1320): n is a, c, g, or t
  misc_feature (1323)..(1333): n is a, c, g, or t
  misc_feature (1337)..(1340): n is a, c, g, or t
gagaaattactatgagaggatcgcatcaccatcaccatcacggatcctatttaggtgacactatagaatcgtcgacccacgcgtccgcgaagcagcagcgcaggttgtccccgtttcccctcccccttcccttctccggttgccttcccgggccccttacactccacagtcccggtcccgccatgtcccagaaacaagaagaagagaaccctgcggaggagaccggcgaggagaagcaggacacgcaggagaaagaaggtattctgcctgagagagctgaagaggcaaagctaaaggccaaatacccaagcctaggacaaaagcctggaggctccgacttcctcatgaagagactccagaaagggcaaaagtactttgactcaggagactacaacatggccaaagccaagatgaagaataagcagctgccaagtgcaggaccagacaagaacctggtgactggtgatcacatccccaccccacaggatctgccccagagaaagtcctcgctcgtcaccagcaagcttgcgggtggccaagttgaatgatgctgcccggggctctgccagatcctgagacgcttcccctccctgccccacccgggtcctgtgctggctcctgccccttcctgcttttgcagccaggggtcaggangtggctcgggtgtgggctggagaggcagaagccctttcctgttggtgtcccagcacatggagccccttgggctgagcaccaagaccttgaaccttttttgttttaccttttttccaaataacagttgggagaaatatcaatgaaattctgggggtgggggtggggttgaaagggtggggtggganatatggaggantatgaattanggcttggagttggtaaaaaacattcctgactatccttcttaaccncgtggctgatgtgggggtaggnatnangggaaggaantngaatannctaatgaaaaaggggttctanttnanntcngtaaanaaatgccttgntttcngtgggggtnggaaaactggtgtcnaaaaaaaaaaaacntccntnnncnaagnaangatgcaaanncttcnnntanttttggnaangntnnttgaaaaanncnnnttnancnttttnaaaannnanggncnttnaaaaaanttnnnnggggnaaaaaagggnnnnnannggnnnnaaaaggnccnngnnnnggggnaacccccnnaancccnngnattttttnntttttnaanaannanannnnnncnnngnaaaanccnnccnnnnnnnnnnnnnnnnnnnnnnnnnnnnnnnnnnnnnnggggnnnnncccnnnnnggnnnnnnnnnnntttnnnn

SEQ ID NO: 58 - DNA, 256 bp, Homo Sapiens
  misc_feature (2)..(2): n is a, c, g, or t
  misc_feature (4)..(4): n is a, c, g, or t
  misc_feature (6)..(6): n is a, c, g, or t
tnangnggagaattaactatgagaggatcgcatcaccatcaccatcacggatcctatttaggtgacactatagaatcgtcgacccacgcgtccgaggaaacagacacggacttagaggtggtgttggaaaaaaaaggcaacatggatgaggcgcacatagaccaggtgaggcgaaaggccttgcaagaagagatcgatcgcgagtcaggcaaaacggaagcttctgaaaccaggaagtggacgggaacccagtttg

SEQ ID NO: 59 - DNA, 1613 bp, Homo Sapiens
  misc_feature (5)..(5): n is a, c, g, or t
  misc_feature (7)..(8): n is a, c, g, or t
  misc_feature (10)..(11): n is a, c, g, or t
  misc_feature (17)..(18): n is a, c, g, or t
  misc_feature (22)..(24): n is a, c, g, or t
  misc_feature (26)..(26): n is a, c, g, or t
  misc_feature (28)..(28): n is a, c, g, or t
  misc_feature (35)..(35): n is a, c, g, or t
  misc_feature (37)..(37): n is a, c, g, or t
  misc_feature (40)..(40): n is a, c, g, or t
  misc_feature (42)..(42): n is a, c, g, or t
  misc_feature (45)..(45): n is a, c, g, or t
  misc_feature (49)..(49): n is a, c, g, or t
  misc_feature (52)..(52): n is a, c, g, or t
  misc_feature (59)..(59): n is a, c, g, or t
  misc_feature (62)..(62): n is a, c, g, or t
  misc_feature (65)..(65): n is a, c, g, or t
  misc_feature (68)..(70): n is a, c, g, or t
  misc_feature (75)..(75): n is a, c, g, or t
  misc_feature (77)..(77): n is a, c, g, or t
  misc_feature (79)..(81): n is a, c, g, or t
  misc_feature (85)..(85): n is a, c, g, or t
  misc_feature (102)..(102): n is a, c, g, or t
  misc_feature (104)..(104): n is a, c, g, or t
  misc_feature (109)..(109): n is a, c, g, or t
  misc_feature (111)..(111): n is a, c, g, or t
  misc_feature (114)..(114): n is a, c, g, or t
  misc_feature (116)..(116): n is a, c, g, or t
  misc_feature (121)..(121): n is a, c, g, or t
  misc_feature (123)..(123): n is a, c, g, or t
  misc_feature (127)..(127): n is a, c, g, or t
  misc_feature (135)..(135): n is a, c, g, or t
  misc_feature (140)..(140): n is a, c, g, or t
  misc_feature (148)..(151): n is a, c, g, or t
  misc_feature (160)..(160): n is a, c, g, or t
  misc_feature (165)..(167): n is a, c, g, or t
  misc_feature (169)..(170): n is a, c, g, or t
  misc_feature (176)..(176): n is a, c, g, or t
  misc_feature (179)..(179): n is a, c, g, or t
  misc_feature (183)..(183): n is a, c, g, or t
  misc_feature (187)..(187): n is a, c, g, or t
  misc_feature (190)..(190): n is a, c, g, or t
  misc_feature (195)..(195): n is a, c, g, or t
  misc_feature (197)..(198): n is a, c, g, or t
  misc_feature (201)..(201): n is a, c, g, or t
  misc_feature (203)..(203): n is a, c, g, or t
  misc_feature (206)..(206): n is a, c, g, or t
  misc_feature (214)..(214): n is a, c, g, or t
  misc_feature (221)..(221): n is a, c, g, or t
  misc_feature (226)..(227): n is a, c, g, or t
  misc_feature (230)..(230): n is a, c, g, or t
  misc_feature (232)..(233): n is a, c, g, or t
  misc_feature (236)..(239): n is a, c, g, or t
  misc_feature (241)..(241): n is a, c, g, or t
  misc_feature (245)..(245): n is a, c, g, or t
  misc_feature (247)..(247): n is a, c, g, or t
  misc_feature (249)..(249): n is a, c, g, or t
  misc_feature (251)..(252): n is a, c, g, or t
  misc_feature (257)..(257): n is a, c, g, or t
  misc_feature (264)..(264): n is a, c, g, or t
  misc_feature (267)..(267): n is a, c, g, or t
  misc_feature (273)..(273): n is a, c, g, or t
  misc_feature (275)..(275): n is a, c, g, or t
  misc_feature (277)..(277): n is a, c, g, or t
  misc_feature (279)..(281): n is a, c, g, or t
  misc_feature (286)..(286): n is a, c, g, or t
  misc_feature (288)..(288): n is a, c, g, or t
  misc_feature (291)..(292): n is a, c, g, or t
  misc_feature (300)..(301): n is a, c, g, or t
  misc_feature (303)..(306): n is a, c, g, or t
  misc_feature (308)..(308): n is a, c, g, or t
  misc_feature (311)..(311): n is a, c, g, or t
  misc_feature (313)..(313): n is a, c, g, or t
  misc_feature (316)..(316): n is a, c, g, or t
  misc_feature (326)..(326): n is a, c, g, or t
  misc_feature (329)..(329): n is a, c, g, or t
  misc_feature (331)..(331): n is a, c, g, or t
  misc_feature (334)..(334): n is a, c, g, or t
  misc_feature (338)..(338): n is a, c, g, or t
  misc_feature (340)..(340): n is a, c, g, or t
  misc_feature (344)..(346): n is a, c, g, or t
  misc_feature (348)..(348): n is a, c, g, or t
  misc_feature (350)..(350): n is a, c, g, or t
  misc_feature (352)..(353): n is a, c, g, or t
  misc_feature (357)..(357): n is a, c, g, or t
  misc_feature (359)..(359): n is a, c, g, or t
  misc_feature (366)..(366): n is a, c, g, or t
  misc_feature (369)..(369): n is a, c, g, or t
  misc_feature (372)..(372): n is a, c, g, or t
  misc_feature (374)..(374): n is a, c, g, or t
  misc_feature (378)..(379): n is a, c, g, or t
  misc_feature (381)..(382): n is a, c, g, or t
  misc_feature (388)..(394): n is a, c, g, or t
  misc_feature (396)..(396): n is a, c, g, or t
  misc_feature (399)..(400): n is a, c, g, or t
  misc_feature (407)..(409): n is a, c, g, or t
  misc_feature (412)..(413): n is a, c, g, or t
  misc_feature (415)..(416): n is a, c, g, or t
  misc_feature (418)..(419): n is a, c, g, or t
  misc_feature (423)..(423): n is a, c, g, or t
  misc_feature (427)..(427): n is a, c, g, or t
  misc_feature (429)..(430): n is a, c, g, or t
  misc_feature (435)..(437): n is a, c, g, or t
  misc_feature (440)..(440): n is a, c, g, or t
  misc_feature (442)..(442): n is a, c, g, or t
  misc_feature (444)..(444): n is a, c, g, or t
  misc_feature (446)..(446): n is a, c, g, or t
  misc_feature (448)..(448): n is a, c, g, or t
  misc_feature (451)..(451): n is a, c, g, or t
  misc_feature (453)..(456): n is a, c, g, or t
  misc_feature (458)..(459): n is a, c, g, or t
  misc_feature (465)..(470): n is a, c, g, or t
  misc_feature (472)..(472): n is a, c, g, or t
  misc_feature (475)..(475): n is a, c, g, or t
  misc_feature (478)..(483): n is a, c, g, or t
  misc_feature (485)..(489): n is a, c, g, or t
  misc_feature (491)..(492): n is a, c, g, or t
  misc_feature (494)..(496): n is a, c, g, or t
  misc_feature (498)..(498): n is a, c, g, or t
  misc_feature (503)..(503): n is a, c, g, or t
  misc_feature (505)..(505): n is a, c, g, or t
  misc_feature (507)..(507): n is a, c, g, or t
  misc_feature (512)..(513): n is a, c, g, or t
  misc_feature (515)..(515): n is a, c, g, or t
  misc_feature (519)..(520): n is a, c, g, or t
  misc_feature (524)..(524): n is a, c, g, or t
  misc_feature (526)..(527): n is a, c, g, or t
  misc_feature (531)..(532): n is a, c, g, or t
  misc_feature (538)..(539): n is a, c, g, or t
  misc_feature (541)..(542): n is a, c, g, or t
  misc_feature (544)..(544): n is a, c, g, or t
  misc_feature (550)..(550): n is a, c, g, or t
  misc_feature (553)..(554): n is a, c, g, or t
  misc_feature (556)..(558): n is a, c, g, or t
  misc_feature (563)..(563): n is a, c, g, or t
  misc_feature (565)..(565): n is a, c, g, or t
  misc_feature (567)..(567): n is a, c, g, or t
  misc_feature (573)..(573): n is a, c, g, or t
  misc_feature (580)..(580): n is a, c, g, or t
  misc_feature (582)..(582): n is a, c, g, or t
  misc_feature (585)..(585): n is a, c, g, or t
  misc_feature (591)..(594): n is a, c, g, or t
  misc_feature (596)..(597): n is a, c, g, or t
  misc_feature (603)..(603): n is a, c, g, or t
  misc_feature (605)..(608): n is a, c, g, or t
  misc_feature (610)..(610): n is a, c, g, or t
  misc_feature (612)..(612): n is a, c, g, or t
  misc_feature (615)..(615): n is a, c, g, or t
  misc_feature (619)..(620): n is a, c, g, or t
  misc_feature (623)..(623): n is a, c, g, or t
  misc_feature (625)..(626): n is a, c, g, or t
  misc_feature (628)..(628): n is a, c, g, or t
  misc_feature (632)..(633): n is a, c, g, or t
  misc_feature (636)..(636): n is a, c, g, or t
  misc_feature (639)..(641): n is a, c, g, or t
  misc_feature (644)..(644): n is a, c, g, or t
  misc_feature (646)..(651): n is a, c, g, or t
  misc_feature (653)..(654): n is a, c, g, or t
  misc_feature (656)..(656): n is a, c, g, or t
  misc_feature (658)..(658): n is a, c, g, or t
  misc_feature (660)..(661): n is a, c, g, or t
  misc_feature (663)..(663): n is a, c, g, or t
  misc_feature (665)..(665): n is a, c, g, or t
  misc_feature (670)..(670): n is a, c, g, or t
  misc_feature (673)..(673): n is a, c, g, or t
  misc_feature (675)..(675): n is a, c, g, or t
  misc_feature (679)..(679): n is a, c, g, or t
  misc_feature (681)..(682): n is a, c, g, or t
  misc_feature (684)..(684): n is a, c, g, or t
  misc_feature (688)..(690): n is a, c, g, or t
  misc_feature (692)..(693): n is a, c, g, or t
  misc_feature (695)..(696): n is a, c, g, or t
  misc_feature (705)..(705): n is a, c, g, or t
  misc_feature (707)..(709): n is a, c, g, or t
  misc_feature (713)..(713): n is a, c, g, or t
  misc_feature (718)..(719): n is a, c, g, or t
  misc_feature (723)..(723): n is a, c, g, or t
  misc_feature (725)..(725): n is a, c, g, or t
  misc_feature (728)..(729): n is a, c, g, or t
  misc_feature (731)..(731): n is a, c, g, or t
  misc_feature (736)..(736): n is a, c, g, or t
  misc_feature (738)..(738): n is a, c, g, or t
  misc_feature (741)..(743): n is a, c, g, or t
  misc_feature (748)..(749): n is a, c, g, or t
  misc_feature (753)..(754): n is a, c, g, or t
  misc_feature (756)..(756): n is a, c, g, or t
  misc_feature (758)..(758): n is a, c, g, or t
  misc_feature (760)..(760): n is a, c, g, or t
  misc_feature (762)..(762): n is a, c, g, or t
  misc_feature (765)..(766): n is a, c, g, or t
  misc_feature (768)..(769): n is a, c, g, or t
  misc_feature (774)..(775): n is a, c, g, or t
  misc_feature (777)..(777): n is a, c, g, or t
  misc_feature (780)..(782): n is a, c, g, or t
  misc_feature (784)..(785): n is a, c, g, or t
  misc_feature (787)..(787): n is a, c, g, or t
  misc_feature (789)..(789): n is a, c, g, or t
  misc_feature (792)..(792): n is a, c, g, or t
  misc_feature (795)..(795): n is a, c, g, or t
  misc_feature (801)..(801): n is a, c, g, or t
  misc_feature (805)..(806): n is a, c, g, or t
  misc_feature (808)..(808): n is a, c, g, or t
  misc_feature (811)..(815): n is a, c, g, or t
  misc_feature (819)..(820): n is a, c, g, or t
  misc_feature (822)..(822): n is a, c, g, or t
  misc_feature (827)..(828): n is a, c, g, or t
  misc_feature (831)..(835): n is a, c, g, or t
  misc_feature (837)..(837): n is a, c, g, or t
  misc_feature (840)..(841): n is a, c, g, or t
  misc_feature (843)..(844): n is a, c, g, or t
  misc_feature (847)..(850): n is a, c, g, or t
  misc_feature (856)..(857): n is a, c, g, or t
  misc_feature (860)..(860): n is a, c, g, or t
  misc_feature (866)..(868): n is a, c, g, or t
  misc_feature (870)..(871): n is a, c, g, or t
  misc_feature (873)..(873): n is a, c, g, or t
  misc_feature (875)..(877): n is a, c, g, or t
  misc_feature (879)..(879): n is a, c, g, or t
  misc_feature (882)..(882): n is a, c, g, or t
  misc_feature (886)..(889): n is a, c, g, or t
  misc_feature (897)..(897): n is a, c, g, or t
  misc_feature (900)..(901): n is a, c, g, or t
  misc_feature (904)..(905): n is a, c, g, or t
  misc_feature (908)..(909): n is a, c, g, or t
  misc_feature (912)..(912): n is a, c, g, or t
  misc_feature (915)..(916): n is a, c, g, or t
  misc_feature (919)..(921): n is a, c, g, or t
  misc_feature (925)..(925): n is a, c, g, or t
  misc_feature (929)..(929): n is a, c, g, or t
  misc_feature (936)..(936): n is a, c, g, or t
  misc_feature (939)..(940): n is a, c, g, or t
  misc_feature (944)..(944): n is a, c, g, or t
  misc_feature (946)..(946): n is a, c, g, or t
  misc_feature (949)..(949): n is a, c, g, or t
  misc_feature (951)..(954): n is a, c, g, or t
  misc_feature (956)..(960): n is a, c, g, or t
  misc_feature (965)..(968): n is a, c, g, or t
  misc_feature (971)..(971): n is a, c, g, or t
  misc_feature (974)..(978): n is a, c, g, or t
  misc_feature (980)..(980): n is a, c, g, or t
  misc_feature (982)..(983): n is a, c, g, or t
  misc_feature (985)..(986): n is a, c, g, or t
  misc_feature (994)..(994): n is a, c, g, or t
  misc_feature (997)..(1001): n is a, c, g, or t
  misc_feature (1007)..(1009): n is a, c, g, or t
  misc_feature (1014)..(1018): n is a, c, g, or t
  misc_feature (1020)..(1020): n is a, c, g, or t
  misc_feature (1022)..(1023): n is a, c, g, or t
  misc_feature (1026)..(1027): n is a, c, g, or t
  misc_feature (1030)..(1030): n is a, c, g, or t
  misc_feature (1032)..(1033): n is a, c, g, or t
  misc_feature (1035)..(1035): n is a, c, g, or t
  misc_feature (1038)..(1041): n is a, c, g, or t
  misc_feature (1043)..(1044): n is a, c, g, or t
  misc_feature (1047)..(1047): n is a, c, g, or t
  misc_feature (1049)..(1049): n is a, c, g, or t
  misc_feature (1051)..(1051): n is a, c, g, or t
  misc_feature (1057)..(1057): n is a, c, g, or t
  misc_feature (1059)..(1060): n is a, c, g, or t
  misc_feature (1063)..(1063): n is a, c, g, or t
  misc_feature (1066)..(1067): n is a, c, g, or t
  misc_feature (1069)..(1070): n is a, c, g, or t
  misc_feature (1075)..(1076): n is a, c, g, or t
  misc_feature (1079)..(1079): n is a, c, g, or t
  misc_feature (1084)..(1086): n is a, c, g, or t
  misc_feature (1088)..(1088): n is a, c, g, or t
  misc_feature (1090)..(1090): n is a, c, g, or t
  misc_feature (1092)..(1092): n is a, c, g, or t
  misc_feature (1094)..(1095): n is a, c, g, or t
  misc_feature (1101)..(1104): n is a, c, g, or t
  misc_feature (1107)..(1108): n is a, c, g, or t
  misc_feature (1111)..(1111): n is a, c, g, or t
  misc_feature (1115)..(1116): n is a, c, g, or t
  misc_feature (1118)..(1119): n is a, c, g, or t
  misc_feature (1122)..(1122): n is a, c, g, or t
  misc_feature (1124)..(1126): n is a, c, g, or t
  misc_feature (1134)..(1134): n is a, c, g, or t
  misc_feature (1138)..(1138): n is a, c, g, or t
  misc_feature (1144)..(1144): n is a, c, g, or t
  misc_feature (1146)..(1147): n is a, c, g, or t
  misc_feature (1150)..(1152): n is a, c, g, or t
  misc_feature (1154)..(1154): n is a, c, g, or t
  misc_feature (1156)..(1156): n is a, c, g, or t
  misc_feature (1159)..(1160): n is a, c, g, or t
  misc_feature (1162)..(1163): n is a, c, g, or t
  misc_feature (1166)..(1166): n is a, c, g, or t
  misc_feature (1171)..(1171): n is a, c, g, or t
  misc_feature (1174)..(1174): n is a, c, g, or t
  misc_feature (1176)..(1176): n is a, c, g, or t
  misc_feature (1178)..(1179): n is a, c, g, or t
  misc_feature (1186)..(1186): n is a, c, g, or t
  misc_feature (1192)..(1193): n is a, c, g, or t
  misc_feature (1196)..(1199): n is a, c, g, or t
  misc_feature (1202)..(1202): n is a, c, g, or t
  misc_feature (1210)..(1211): n is a, c, g, or t
  misc_feature (1214)..(1215): n is a, c, g, or t
  misc_feature (1218)..(1218): n is a, c, g, or t
  misc_feature (1220)..(1223): n is a, c, g, or t
  misc_feature (1225)..(1225): n is a, c, g, or t
  misc_feature (1228)..(1228): n is a, c, g, or t
  misc_feature (1231)..(1231): n is a, c, g, or t
  misc_feature (1235)..(1235): n is a, c, g, or t
  misc_feature (1240)..(1241): n is a, c, g, or t
  misc_feature (1243)..(1243): n is a, c, g, or t
  misc_feature (1245)..(1245): n is a, c, g, or t
  misc_feature (1250)..(1250): n is a, c, g, or t
  misc_feature (1255)..(1259): n is a, c, g, or t
  misc_feature (1262)..(1262): n is a, c, g, or t
  misc_feature (1264)..(1268): n is a, c, g, or t
  misc_feature (1272)..(1272): n is a, c, g, or t
  misc_feature (1274)..(1275): n is a, c, g, or t
  misc_feature (1277)..(1277): n is a, c, g, or t
  misc_feature (1279)..(1280): n is a, c, g, or t
  misc_feature (1287)..(1288): n is a, c, g, or t
  misc_feature (1290)..(1291): n is a, c, g, or t
  misc_feature (1293)..(1293): n is a, c, g, or t
  misc_feature (1295)..(1296): n is a, c, g, or t
  misc_feature (1301)..(1301): n is a, c, g, or t
  misc_feature (1303)..(1303): n is a, c, g, or t
  misc_feature (1311)..(1311): n is a, c, g, or t
  misc_feature (1314)..(1314): n is a, c, g, or t
  misc_feature (1319)..(1319): n is a, c, g, or t
  misc_feature (1321)..(1322): n is a, c, g, or t
  misc_feature (1325)..(1328): n is a, c, g, or t
  misc_feature (1331)..(1334): n is a, c, g, or t
  misc_feature (1336)..(1338): n is a, c, g, or t
  misc_feature (1340)..(1340): n is a, c, g, or t
  misc_feature (1342)..(1342): n is a, c, g, or t
  misc_feature (1346)..(1347): n is a, c, g, or t
  misc_feature (1352)..(1356): n is a, c, g, or t
  misc_feature (1361)..(1361): n is a, c, g, or t
  misc_feature (1367)..(1368): n is a, c, g, or t
  misc_feature (1370)..(1371): n is a, c, g, or t
  misc_feature (1373)..(1373): n is a, c, g, or t
  misc_feature (1375)..(1375): n is a, c, g, or t
  misc_feature (1383)..(1384): n is a, c, g, or t
  misc_feature (1387)..(1388): n is a, c, g, or t
  misc_feature (1403)..(1405): n is a, c, g, or t
  misc_feature (1409)..(1411): n is a, c, g, or t
  misc_feature (1413)..(1414): n is a, c, g, or t
  misc_feature (1416)..(1417): n is a, c, g, or t
  misc_feature (1426)..(1426): n is a, c, g, or t
  misc_feature (1430)..(1432): n is a, c, g, or t
  misc_feature (1435)..(1435): n is a, c, g, or t
  misc_feature (1439)..(1442): n is a, c, g, or t
  misc_feature (1444)..(1445): n is a, c, g, or t
  misc_feature (1449)..(1449): n is a, c, g, or t
  misc_feature (1458)..(1458): n is a, c, g, or t
  misc_feature (1469)..(1469): n is a, c, g, or t
  misc_feature (1472)..(1472): n is a, c, g, or t
  misc_feature (1477)..(1477): n is a, c, g, or t
  misc_feature (1481)..(1482): n is a, c, g, or t
  misc_feature (1489)..(1489): n is a, c, g, or t
  misc_feature (1493)..(1494): n is a, c, g, or t
  misc_feature (1500)..(1500): n is a, c, g, or t
  misc_feature (1502)..(1502): n is a, c, g, or t
  misc_feature (1507)..(1507): n is a, c, g, or t
  misc_feature (1509)..(1509): n is a, c, g, or t
  misc_feature (1511)..(1512): n is a, c, g, or t
  misc_feature (1515)..(1515): n is a, c, g, or t
  misc_feature (1521)..(1521): n is a, c, g, or t
  misc_feature (1526)..(1526): n is a, c, g, or t
  misc_feature (1528)..(1529): n is a, c, g, or t
  misc_feature (1531)..(1531): n is a, c, g, or t
  misc_feature (1533)..(1533): n is a, c, g, or t
  misc_feature (1535)..(1535): n is a, c, g, or t
  misc_feature (1537)..(1538): n is a, c, g, or t
  misc_feature (1541)..(1542): n is a, c, g, or t
  misc_feature (1545)..(1545): n is a, c, g, or t
  misc_feature (1557)..(1557): n is a, c, g, or t
  misc_feature (1559)..(1559): n is a, c, g, or t
  misc_feature (1561)..(1561): n is a, c, g, or t
  misc_feature (1569)..(1570): n is a, c, g, or t
  misc_feature (1574)..(1574): n is a, c, g, or t
  misc_feature (1579)..(1579): n is a, c, g, or t
  misc_feature (1584)..(1584): n is a, c, g, or t
  misc_feature (1587)..(1589): n is a, c, g, or t
  misc_feature (1591)..(1591): n is a, c, g, or t
  misc_feature (1596)..(1596): n is a, c, g, or t
  misc_feature (1599)..(1599): n is a, c, g, or t
  misc_feature (1602)..(1602): n is a, c, g, or t
  misc_feature (1604)..(1604): n is a, c, g, or t
  misc_feature (1606)..(1606): n is a, c, g, or t
  misc_feature (1612)..(1612): n is a, c, g, or t
ccaananngnnaaatanngggnnncncnccccttncnggntnctntttnggnagccctnatnctnctnnnccttntntnnngaanaggggggttggtgttcncncccancntcntntctcnantttnctcactcnagtcncactcccnnnnctctcctcntgttnnntnntgtctntgngttncagnagntggantnnatntnacnctggcttnccaactncgatnngcncnnccnnnngnacantngngnntctcnctcctcnganaatttntnantnnnaaggngnggnncctgactnncnnnncnatntnctntcattcatanatncnggngatncnccannngngntnngcanancccgcgntcntcnanaccnncnngcaatnnnnnnncncanntgaggtnnntcnncnntnncccngatntnntcgtnnnatnanangntnacnannnncnnactctnnnnnntncanatnnnnnnannnnngnngnnncngaaantnanaactnncntgcnnaccntnngtgnntggcgnnanncncgtacntgnntnnntaatncnanttactncaacgtntncancgtagnnnnanncaatancnnnntncnacnccgnnccngnncncctnnttnttnnncanannnnnntnnanancnncncnctctnctncnctcncnntnttcnnntnntnngccatgacntnnnaccngatgnnaacntngcnncngatcncnccnnnaattnncacnnananancncannanncaatnntnccnnncnnananaancantctctnatcnncntgnnnnntctnnangtctnncgnnnnnanttnncnncannnnaagttnntcnaaaatnnntnncncnnncnttngcannnnttctcctnaanntcnnccnnaanatnntannnaatnaatncgacgcntanncctncntcnannnntnnnnncaacnnnntcnatnnnnnancnncnnccattagnctnnnnnagtcannnctcgnnnnntntnnccnnatntnncngannnnannttncntncctcancnngtncgnntnnctctnngcnctatnnngntngntnntgtcannnnccnnacnctannannatngnnncttcgagnaaantcatcntnnctnnntngnctnncnngtnatcanccnanannccacgcngtactnncannnnaantccttaannagnncantnnnnanaantangctntgccnncntnaccancctcnnnnntcntnnnnncacntnntnannttaatannanntncnntgccnanactcagtnttnctagncnntcnnnncgnnnnannntnancacnntctcnnnnnccgtntgagtnnanncnantattcggnncanntaaaacccttcatannnttannntnnanntctgctacngccnnntanaccnnnntnnagtncatcctaanccgtctctctngtngcctntctnnccatttnactnntatttntntaatnancnngtnccatcntgtcnanntncnancnnccnnccnctacttcttatntntnttacctanntagncagtntcttntcnnngntcgtngtngtncntntatcant

SEQ ID NO: 60 - DNA, 1200 bp, Homo Sapiens
  misc_feature (1)..(1): n is a, c, g, or t
  misc_feature (735)..(737): n is a, c, g, or t
  misc_feature (739)..(790): n is a, c, g, or t
  misc_feature (798)..(798): n is a, c, g, or t
  misc_feature (805)..(805): n is a, c, g, or t
  misc_feature (814)..(814): n is a, c, g, or t
  misc_feature (836)..(836): n is a, c, g, or t
  misc_feature (841)..(841): n is a, c, g, or t
  misc_feature (849)..(849): n is a, c, g, or t
  misc_feature (852)..(852): n is a, c, g, or t
  misc_feature (866)..(866): n is a, c, g, or t
  misc_feature (878)..(878): n is a, c, g, or t
  misc_feature (917)..(917): n is a, c, g, or t
  misc_feature (924)..(924): n is a, c, g, or t
  misc_feature (933)..(933): n is a, c, g, or t
  misc_feature (962)..(962): n is a, c, g, or t
  misc_feature (966)..(966): n is a, c, g, or t
  misc_feature (968)..(968): n is a, c, g, or t
  misc_feature (977)..(978): n is a, c, g, or t
  misc_feature (986)..(986): n is a, c, g, or t
  misc_feature (990)..(990): n is a, c, g, or t
  misc_feature (1015)..(1015): n is a, c, g, or t
  misc_feature (1021)..(1021): n is a, c, g, or t
  misc_feature (1029)..(1029): n is a, c, g, or t
  misc_feature (1036)..(1036): n is a, c, g, or t
  misc_feature (1039)..(1039): n is a, c, g, or t
  misc_feature (1045)..(1045): n is a, c, g, or t
  misc_feature (1048)..(1048): n is a, c, g, or t
  misc_feature (1053)..(1053): n is a, c, g, or t
  misc_feature (1056)..(1057): n is a, c, g, or t
  misc_feature (1063)..(1064): n is a, c, g, or t
  misc_feature (1069)..(1069): n is a, c, g, or t
  misc_feature (1071)..(1071): n is a, c, g, or t
  misc_feature (1075)..(1076): n is a, c, g, or t
  misc_feature (1081)..(1081): n is a, c, g, or t
  misc_feature (1085)..(1085): n is a, c, g, or t
  misc_feature (1091)..(1091): n is a, c, g, or t
  misc_feature (1095)..(1096): n is a, c, g, or t
  misc_feature (1098)..(1098): n is a, c, g, or t
  misc_feature (1103)..(1104): n is a, c, g, or t
  misc_feature (1113)..(1113): n is a, c, g, or t
  misc_feature (1127)..(1127): n is a, c, g, or t
  misc_feature (1133)..(1133): n is a, c, g, or t
  misc_feature (1138)..(1138): n is a, c, g, or t
  misc_feature (1147)..(1147): n is a, c, g, or t
  misc_feature (1163)..(1163): n is a, c, g, or t
  misc_feature (1168)..(1168): n is a, c, g, or t
  misc_feature (1172)..(1172): n is a, c, g, or t
  misc_feature (1183)..(1184): n is a, c, g, or t
naattagagaaattactatgagaggatcgcatcaccatcaccatcacggatcctatttaggtgacactatagaatcgtcgacccacgcgtccgcacagaagaagctgctagaggaaagactaaagcttgtctcagaactgtgggatgctgggatcaaggctgagctgctgtacaagaagaacccaaagctactgaaccagttacagtactgtgaggaggcaggcatcccactggtggctatcatcggcgagcaggaactcaaggatggggtcatcaagctccgttcagtgacgagcagggaagaggtggatgtccgaagagaagaccttgtggaggaaatcaaaaggagaacaggccagcccctctgcatctgctgaactgaacaaactatcagaggaaaggaagtgggactggcactatttgaggttaagacaaactgcatatgtacttcaattgctttgcacttttccgtttcagcggaagacctgaagagtggtcagaacagagcctttgatttttattatggttattttattgattattactggcaaaaacggccaggtacaacacctttttcatacaaggcccaggaggcttagtccagtctgtgctcctgggctacaaggacccagcctgagatggtcccatctgcagggccccgcaccagttggagcagatgcctccccaccaccaattgccaaaggtccaataaaatgcctcaaccacgttaaaaannnannnnnnnnnnnnnnnnnnnnnnnnnnnnnnnnnnnnnnnnnnnnnnnnnnnnaaaagggnggccgcnccctatagngagtcgtattaagcttaattanctgancttggacnccnggttgataaatccngtaatgaccccnaaactccctctggatttgttccaaaaccctcggttgccncccgggngtttttttnttgggggaaaaatccaagcctagcttggncgananttttccggnncctaaggnaacntaaaaatgggaaaaaaaaaatcccngggaantacccccngttgaanttntccccnatnggccnccnnaaaaannttttngngggnntttcngccngttgcnccanngnccctnnacccaaacngttccctggaaatnacgccnttttnaaaacccgnaaaaaaaaaacccaanttttntccnggccttttttnnatttttgccccccgga

SEQ ID NO: 61 - DNA, 1278 bp, Homo Sapiens
  misc_feature (17)..(17): n is a, c, g, or t
  misc_feature (689)..(689): n is a, c, g, or t
  misc_feature (697)..(697): n is a, c, g, or t
  misc_feature (699)..(699): n is a, c, g, or t
  misc_feature (704)..(708): n is a, c, g, or t
  misc_feature (711)..(711): n is a, c, g, or t
  misc_feature (716)..(718): n is a, c, g, or t
  misc_feature (720)..(721): n is a, c, g, or t
  misc_feature (723)..(724): n is a, c, g, or t
  misc_feature (726)..(728): n is a, c, g, or t
  misc_feature (736)..(736): n is a, c, g, or t
  misc_feature (739)..(739): n is a, c, g, or t
  misc_feature (746)..(746): n is a, c, g, or t
  misc_feature (754)..(756): n is a, c, g, or t
  misc_feature (758)..(758): n is a, c, g, or t
  misc_feature (760)..(760): n is a, c, g, or t
  misc_feature (764)..(764): n is a, c, g, or t
  misc_feature (770)..(770): n is a, c, g, or t
  misc_feature (773)..(775): n is a, c, g, or t
  misc_feature (777)..(777): n is a, c, g, or t
  misc_feature (783)..(783): n is a, c, g, or t
  misc_feature (791)..(793): n is a, c, g, or t
  misc_feature (795)..(796): n is a, c, g, or t
  misc_feature (802)..(802): n is a, c, g, or t
  misc_feature (815)..(815): n is a, c, g, or t
  misc_feature (821)..(821): n is a, c, g, or t
  misc_feature (831)..(832): n is a, c, g, or t
  misc_feature (834)..(834): n is a, c, g, or t
  misc_feature (837)..(837): n is a, c, g, or t
  misc_feature (846)..(846): n is a, c, g, or t
  misc_feature (852)..(852): n is a, c, g, or t
  misc_feature (855)..(856): n is a, c, g, or t
  misc_feature (859)..(860): n is a, c, g, or t
  misc_feature (868)..(868): n is a, c, g, or t
  misc_feature (873)..(873): n is a, c, g, or t
  misc_feature (884)..(884): n is a, c, g, or t
  misc_feature (888)..(888): n is a, c, g, or t
  misc_feature (894)..(895): n is a, c, g, or t
  misc_feature (898)..(898): n is a, c, g, or t
  misc_feature (900)..(901): n is a, c, g, or t
  misc_feature (909)..(909): n is a, c, g, or t
  misc_feature (920)..(920): n is a, c, g, or t
  misc_feature (925)..(927): n is a, c, g, or t
  misc_feature (930)..(930): n is a, c, g, or t
  misc_feature (933)..(935): n is a, c, g, or t
  misc_feature (947)..(947): n is a, c, g, or t
  misc_feature (961)..(961): n is a, c, g, or t
  misc_feature (965)..(965): n is a, c, g, or t
  misc_feature (967)..(967): n is a, c, g, or t
  misc_feature (969)..(969): n is a, c, g, or t
  misc_feature (999)..(999): n is a, c, g, or t
  misc_feature (1003)..(1003): n is a, c, g, or t
  misc_feature (1013)..(1013): n is a, c, g, or t
  misc_feature (1021)..(1021): n is a, c, g, or t
  misc_feature (1027)..(1027): n is a, c, g, or t
  misc_feature (1029)..(1031): n is a, c, g, or t
  misc_feature (1033)..(1037): n is a, c, g, or t
  misc_feature (1041)..(1041): n is a, c, g, or t
  misc_feature (1047)..(1049): n is a, c, g, or t
  misc_feature (1052)..(1052): n is a, c, g, or t
  misc_feature (1059)..(1060): n is a, c, g, or t
  misc_feature (1066)..(1066): n is a, c, g, or t
  misc_feature (1068)..(1069): n is a, c, g, or t
  misc_feature (1073)..(1073): n is a, c, g, or t
  misc_feature (1075)..(1075): n is a, c, g, or t
  misc_feature (1077)..(1077): n is a, c, g, or t
  misc_feature (1080)..(1080): n is a, c, g, or t
  misc_feature (1082)..(1082): n is a, c, g, or t
  misc_feature (1092)..(1092): n is a, c, g, or t
  misc_feature (1096)..(1096): n is a, c, g, or t
  misc_feature (1098)..(1098): n is a, c, g, or t
  misc_feature (1102)..(1102): n is a, c, g, or t
  misc_feature (1114)..(1114): n is a, c, g, or t
  misc_feature (1119)..(1119): n is a, c, g, or t
  misc_feature (1130)..(1130): n is a, c, g, or t
  misc_feature (1140)..(1140): n is a, c, g, or t
  misc_feature (1142)..(1142): n is a, c, g, or t
  misc_feature (1150)..(1150): n is a, c, g, or t
  misc_feature (1156)..(1156): n is a, c, g, or t
  misc_feature (1159)..(1160): n is a, c, g, or t
  misc_feature (1165)..(1165): n is a, c, g, or t
  misc_feature (1167)..(1167): n is a, c, g, or t
  misc_feature (1172)..(1173): n is a, c, g, or t
  misc_feature (1184)..(1184): n is a, c, g, or t
  misc_feature (1195)..(1195): n is a, c, g, or t
  misc_feature (1199)..(1200): n is a, c, g, or t
  misc_feature (1205)..(1206): n is a, c, g, or t
  misc_feature (1216)..(1216): n is a, c, g, or t
  misc_feature (1241)..(1241): n is a, c, g, or t
  misc_feature (1247)..(1247): n is a, c, g, or t
  misc_feature (1266)..(1266): n is a, c, g, or t
  misc_feature (1268)..(1268): n is a, c, g, or t
  misc_feature (1271)..(1271): n is a, c, g, or t
  misc_feature (1277)..(1277): n is a, c, g, or t
taaatagagaaaattanctatgaagaggatcgcatcaccatcaccatcacggatcctatttaggtgacactatagaatcgtcgacccacgcgtccgccgagctggttggtggcggcggtcgtgcggacgcaaacatgcagatctttgtgaagaccctcactggcaaaaccatcacccttgaggtcgagcccagtgacaccattgagaatgtcaaagccaaaattcaagacaaggagggtatcccacctgaccagcagcgtctgatatttgccggcaaacagctggaggatggccgcactctctcagactacaacatccagaaagagtccaccctgcacctggtgttgcgcctgcgaggtggcattattgagccttctctccgccagcttgcccagaaatacaactgcgacaagatgatctgccgcaagtgctatgctcgccttcaccctcgtgctgtcaactgccgcaagaagaagtgtggtcacaccaacaacctgcgtcccaagaagaaggtcaaataaggtggttctttccttgaagggcagcctcctgcccaggccccgtggccctggagcctcaataaagtgtccctttcattgaaaaaaaaaaaaaaaaaaaaaaaaaaaaaaaaaaaaaaaaaaaaaaaaaaaaaaaaaaaaaaaaaaaaaaaaaaaaaaaaaaaaaaaaanaaaaaaananaaaannnnnaanaaaannnannannannngggggggnccnccccccnaggggggnnnananaaancttttnttnnngnaatttnggcccccnnngnnaaaaanaccccaaaaaggncccccnaaaacccccnntntgnttttttttnaaaaanccnnggnngggccccnggggnttttttttttngggnaaaaanncancnnctttgggngaaattttttnggggnnntanggnnnttttaatggggnaaaaaaaaaacccngggntnantccccccttttaaattttcccccgggggcnccanaaaaaaaaanttttgggngttttnannncnnnnngccnaaggannntanaaaccanncccctncnngggnanantancngccctttttnaaanancggnaaaaaaaaaaanccccnttttttttccngccttttttntncttttttngccccnggnnaaagngnccccnnattttttaggnaaaaaaaaaangggnngtggnnataggaaaantttcccctttttaacccttttttanaaaaanaaaaattttttcccctggnanaanaaccana

SEQ ID NO: 62 - DNA, 1200 bp, Homo Sapiens
  misc_feature (1)..(1): n is a, c, g, or t
  misc_feature (513)..(514): n is a, c, g, or t
  misc_feature (517)..(517): n is a, c, g, or t
  misc_feature (523)..(523): n is a, c, g, or t
  misc_feature (529)..(529): n is a, c, g, or t
  misc_feature (540)..(542): n is a, c, g, or t
  misc_feature (544)..(544): n is a, c, g, or t
  misc_feature (549)..(550): n is a, c, g, or t
  misc_feature (552)..(553): n is a, c, g, or t
  misc_feature (555)..(560): n is a, c, g, or t
  misc_feature (562)..(569): n is a, c, g, or t
  misc_feature (571)..(576): n is a, c, g, or t
  misc_feature (578)..(579): n is a, c, g, or t
  misc_feature (581)..(583): n is a, c, g, or t
  misc_feature (585)..(591): n is a, c, g, or t
  misc_feature (597)..(597): n is a, c, g, or t
  misc_feature (599)..(599): n is a, c, g, or t
  misc_feature (613)..(613): n is a, c, g, or t
  misc_feature (615)..(615): n is a, c, g, or t
  misc_feature (619)..(620): n is a, c, g, or t
  misc_feature (631)..(631): n is a, c, g, or t
  misc_feature (643)..(643): n is a, c, g, or t
  misc_feature (645)..(646): n is a, c, g, or t
  misc_feature (651)..(652): n is a, c, g, or t
  misc_feature (661)..(661): n is a, c, g, or t
  misc_feature (664)..(664): n is a, c, g, or t
  misc_feature (681)..(681): n is a, c, g, or t
  misc_feature (684)..(685): n is a, c, g, or t
  misc_feature (705)..(705): n is a, c, g, or t
  misc_feature (720)..(721): n is a, c, g, or t
  misc_feature (728)..(728): n is a, c, g, or t
  misc_feature (732)..(733): n is a, c, g, or t
  misc_feature (739)..(739): n is a, c, g, or t
  misc_feature (743)..(743): n is a, c, g, or t
  misc_feature (764)..(764): n is a, c, g, or t
  misc_feature (768)..(768): n is a, c, g, or t
  misc_feature (774)..(774): n is a, c, g, or t
  misc_feature (795)..(795): n is a, c, g, or t
  misc_feature (806)..(806): n is a, c, g, or t
  misc_feature (827)..(827): n is a, c, g, or t
  misc_feature (831)..(831): n is a, c, g, or t
  misc_feature (841)..(841): n is a, c, g, or t
  misc_feature (843)..(843): n is a, c, g, or t
  misc_feature (854)..(854): n is a, c, g, or t
  misc_feature (859)..(860): n is a, c, g, or t
  misc_feature (864)..(864): n is a, c, g, or t
  misc_feature (868)..(868): n is a, c, g, or t
  misc_feature (872)..(872): n is a, c, g, or t
  misc_feature (875)..(875): n is a, c, g, or t
  misc_feature (877)..(877): n is a, c, g, or t
  misc_feature (882)..(882): n is a, c, g, or t
  misc_feature (894)..(894): n is a, c, g, or t
  misc_feature (898)..(898): n is a, c, g, or t
  misc_feature (909)..(909): n is a, c, g, or t
  misc_feature (914)..(914): n is a, c, g, or t
  misc_feature (931)..(931): n is a, c, g, or t
  misc_feature (944)..(944): n is a, c, g, or t
  misc_feature (949)..(949): n is a, c, g, or t
  misc_feature (951)..(951): n is a, c, g, or t
  misc_feature (966)..(966): n is a, c, g, or t
  misc_feature (977)..(977): n is a, c, g, or t
  misc_feature (980)..(980): n is a, c, g, or t
  misc_feature (983)..(983): n is a, c, g, or t
  misc_feature (1001)..(1001): n is a, c, g, or t
  misc_feature (1003)..(1003): n is a, c, g, or t
  misc_feature (1011)..(1011): n is a, c, g, or t
  misc_feature (1017)..(1018): n is a, c, g, or t
  misc_feature (1026)..(1026): n is a, c, g, or t
  misc_feature (1028)..(1028): n is a, c, g, or t
  misc_feature (1030)..(1030): n is a, c, g, or t
  misc_feature (1046)..(1046): n is a, c, g, or t
  misc_feature (1051)..(1051): n is a, c, g, or t
  misc_feature (1063)..(1064): n is a, c, g, or t
  misc_feature (1072)..(1072): n is a, c, g, or t
  misc_feature (1077)..(1077): n is a, c, g, or t
  misc_feature (1079)..(1079): n is a, c, g, or t
  misc_feature (1082)..(1083): n is a, c, g, or t
  misc_feature (1094)..(1095): n is a, c, g, or t
  misc_feature (1098)..(1098): n is a, c, g, or t
  misc_feature (1101)..(1101): n is a, c, g, or t
  misc_feature (1106)..(1106): n is a, c, g, or t
  misc_feature (1117)..(1117): n is a, c, g, or t
  misc_feature (1120)..(1120): n is a, c, g, or t
  misc_feature (1130)..(1130): n is a, c, g, or t
  misc_feature (1135)..(1135): n is a, c, g, or t
  misc_feature (1146)..(1148): n is a, c, g, or t
  misc_feature (1155)..(1158): n is a, c, g, or t
  misc_feature (1160)..(1160): n is a, c, g, or t
  misc_feature (1162)..(1162): n is a, c, g, or t
  misc_feature (1169)..(1169): n is a, c, g, or t
  misc_feature (1174)..(1174): n is a, c, g, or t
  misc_feature (1184)..(1184): n is a, c, g, or t
  misc_feature (1188)..(1189): n is a, c, g, or t
  misc_feature (1200)..(1200): n is a, c, g, or t
naattagagaaattactatgagaggatcgcatcaccatcaccatcacggatcctatttaggtgacactatagaatcgtcgacccacgcgtccgccaagatgccgcccaaaggaaaaagtggttctggaaaagcggggaaagggggagcagcctctgggagtgacagtgctgacaagaaggctcaaggtcccaaaggtggtggcaatgcagtaaaggtcagacacattctatgtgaaaaacatggcaaaatcatggaagccatggaaaagttaaagtctgggatgagattcaatgaagtggccgcacagtatagtgaagataaagccaggcaagggggtgacttgggttggatgaccagagggtccatggtgggaccatttcaagaagcagcatttgccttgcctgtaagtgggatggataagcctgtgtttacagacccaccggttaagacaaaatttggatatcatattattatggtcgaaggaagaaaataaaatcatatgaaagactgannaanaaaaanaaaaanaaaaaaaaaannnanaaaannannannnnnnannnnnnnnannnnnnannannnannnnnnnaggggngncccccccctatagngngccnnattaaccttanttacctgacctngnnccccnnttgaaaaanccngtaatgcccccaaaacnccnnctggattttttcaaaacccncggttgcccccgggnnttttttnttgnngaaaanccancctaccttggcgaaattttcngganctaggnacctaaaatggaaaaaaaaanccctggatatncccccgttgaaatttccccanggcntcctaaaaanantttttggggcntttcnncccnttgncccnagngncccanaaacccaacccnttcncctggaaaatnacccncccttttttaaaacccnaaaaaaaaaaaanccccnantttttttccgggccntttttttcccnttnttnccccccccgaaaaaaagncncccccccnaaattnnttttgggnantnaaaaaaacggggaccnggggnaatgggaaaaannttcccccnttttnanccnnttttcctgaannaanatnaaaantttttctcccnccnggaggaaaanccccnaaaatttccgnnngtttttnnnnananttccccnaaaangggggggttncggnnaaaacccgccn

SEQ ID NO: 63 - DNA, 1200 bp, Homo Sapiens
  misc_feature (1)..(1): n is a, c, g, or t
  misc_feature (309)..(309): n is a, c, g, or t
  misc_feature (789)..(789): n is a, c, g, or t
  misc_feature (798)..(798): n is a, c, g, or t
  misc_feature (832)..(832): n is a, c, g, or t
  misc_feature (847)..(847): n is a, c, g, or t
  misc_feature (863)..(863): n is a, c, g, or t
  misc_feature (877)..(877): n is a, c, g, or t
  misc_feature (909)..(909): n is a, c, g, or t
  misc_feature (916)..(916): n is a, c, g, or t
  misc_feature (921)..(921): n is a, c, g, or t
  misc_feature (927)..(927): n is a, c, g, or t
  misc_feature (929)..(929): n is a, c, g, or t
  misc_feature (950)..(951): n is a, c, g, or t
  misc_feature (969)..(969): n is a, c, g, or t
  misc_feature (981)..(981): n is a, c, g, or t
  misc_feature (994)..(994): n is a, c, g, or t
  misc_feature (997)..(997): n is a, c, g, or t
  misc_feature (1007)..(1008): n is a, c, g, or t
  misc_feature (1021)..(1021): n is a, c, g, or t
  misc_feature (1023)..(1024): n is a, c, g, or t
  misc_feature (1028)..(1028): n is a, c, g, or t
  misc_feature (1050)..(1050): n is a, c, g, or t
  misc_feature (1052)..(1053): n is a, c, g, or t
  misc_feature (1064)..(1064): n is a, c, g, or t
  misc_feature (1066)..(1066): n is a, c, g, or t
  misc_feature (1070)..(1070): n is a, c, g, or t
  misc_feature (1072)..(1072): n is a, c, g, or t
  misc_feature (1076)..(1076): n is a, c, g, or t
  misc_feature (1084)..(1084): n is a, c, g, or t
  misc_feature (1090)..(1090): n is a, c, g, or t
  misc_feature (1093)..(1093): n is a, c, g, or t
  misc_feature (1098)..(1098): n is a, c, g, or t
  misc_feature (1103)..(1103): n is a, c, g, or t
  misc_feature (1105)..(1105): n is a, c, g, or t
  misc_feature (1113)..(1113): n is a, c, g, or t
  misc_feature (1124)..(1124): n is a, c, g, or t
  misc_feature (1129)..(1129): n is a, c, g, or t
  misc_feature (1138)..(1140): n is a, c, g, or t
  misc_feature (1165)..(1165): n is a, c, g, or t
  misc_feature (1169)..(1169): n is a, c, g, or t
  misc_feature (1171)..(1172): n is a, c, g, or t
  misc_feature (1175)..(1176): n is a, c, g, or t
  misc_feature (1180)..(1181): n is a, c, g, or t
  misc_feature (1184)..(1184): n is a, c, g, or t
  misc_feature (1190)..(1190): n is a, c, g, or t
  misc_feature (1195)..(1195): n is a, c, g, or t
naattagagaaattactatgagaggatcgcatcaccatcaccatcacggatcctatttaggtgacactatagaatcgtcgacccacgcgtccgctttgccatcccctcgagaagtgactgttacagaacggctcctcctggatggcccaccacctcattcaccagagactcctcaatttccccccacaactggagctgtactgtacactgttaagagaaaccaggttgggcctgaggttcgctcctgccccaaggcatcccccagacttcagaaagagagggagggccaaaaggcagtgagtgagtcanaggctttgatgctggtctgggatgcatcagaaactgagaaattgcctggtaccgtggaaccccctgcttccttcctgagtcctgtttcctcaaagaccagagatgcagggagaagacatgtgtccgggaaaccagacactcaagagagatggctgccctcaagcagagctcgggtgaagacaagagacaggacgtgccctgtccatgaatctccatcaggaattgacacctcagagacttctcccaaagcccctagagggggtttggctaaagacagtggaacacaggccaagggtccagagggggagcagcagccaaaggccgcagaagctacggtgtgtgccaacaacagcaaggtcagctccactggggaaaaggttgtcctgtggacaaggtaggtaagggtggatgacgtgtgtttggaaaaagagcatagaccacatccatgtggctccctagggttaatcatgatacctgggnttacagggnaagctgaccgtgtgatcctcaccatgtgccaagnacaagggggcacagnccacagaaccttcaanatcatcttcccaancagctgggaaaataaaaaccccttgctgaggntttcccnaccgnttttcnanaaactcatgcaactctttccnnactggcctgggaaacccngctctgaagganggaaggatgatgncancccattaccnncaatggcaaaccnanntgtntggaccatgggggacctttttntnntaaaaaaaaancnggantnaaangaaaattnttgggnaantcttnttaancngggaaccnaaaccccaaanggggncccctgggnnnccgggggaaggggggaaattttaancccngnnttnnaaannccnttgganccccnttttt

SEQ ID NO: 64 - DNA, 256 bp, Homo Sapiens
ttattaaagaggagaaattactatgagaggatcgcataccatcaccatcacggatcctatttaggtgacactatagaatcgtcgacccacgcgtccgagaagctgaaggattatttacgaagcaaagagaaacacggcaagaagccagtcaaagagaaccagagtgagggcaagggcagtgacagtgacagtgaaggggataatccggagaaaaagaaactgcaagaacagctgatgggtgccgtcgtgatggaga

SEQ ID NO: 65 - DNA, 1200 bp, Homo Sapiens
  misc_feature (759)..(759): n is a, c, g, or t
  misc_feature (781)..(781): n is a, c, g, or t
  misc_feature (932)..(932): n is a, c, g, or t
  misc_feature (985)..(986): n is a, c, g, or t
  misc_feature (988)..(988): n is a, c, g, or t
  misc_feature (1013)..(1013): n is a, c, g, or t
  misc_feature (1023)..(1023): n is a, c, g, or t
  misc_feature (1026)..(1026): n is a, c, g, or t
  misc_feature (1049)..(1049): n is a, c, g, or t
  misc_feature (1055)..(1055): n is a, c, g, or t
  misc_feature (1060)..(1060): n is a, c, g, or t
  misc_feature (1069)..(1069): n is a, c, g, or t
  misc_feature (1072)..(1072): n is a, c, g, or t
  misc_feature (1091)..(1091): n is a, c, g, or t
  misc_feature (1093)..(1093): n is a, c, g, or t
  misc_feature (1101)..(1101): n is a, c, g, or t
  misc_feature (1107)..(1107): n is a, c, g, or t
  misc_feature (1124)..(1124): n is a, c, g, or t
  misc_feature (1130)..(1130): n is a, c, g, or t
  misc_feature (1143)..(1143): n is a, c, g, or t
  misc_feature (1151)..(1151): n is a, c, g, or t
  misc_feature (1156)..(1156): n is a, c, g, or t
  misc_feature (1159)..(1159): n is a, c, g, or t
  misc_feature (1167)..(1167): n is a, c, g, or t
  misc_feature (1178)..(1178): n is a, c, g, or t
  misc_feature (1190)..(1190): n is a, c, g, or t
tagagagattaactatgagaggatcgcatcaccatcaccatcacggatcctatttaggtgacactatagaatcgtcgacccacgcgtccgcccacgcgtccgggagcacctgcacctggagtctacccagggccacccagcggccctggggcctacccatcttctggacagccaagtgccaccggagcctaccctgccactggcccctatggcgcccctgctgggccactgattgtgccttataacctgcctttgcctgggggagtggtgcctcgcatgctgataacaattctgggcacggtgaagcccaatgcaaacagaattgctttagatttccaaagagggaatgatgttgccttccactttaacccacgcttcaatgagaacaacaggagagtcattgtttgcaatacaaagctggataataactggggaagggaagaaagacagtcggttttcccatttgaaagtgggaaaccattcaaaatacaagtactggttgaacctgaccacttcaaggttgcagtgaatgatgctcacttgttgcagtacaatcatcgggttaaaaaactcaatgaaatcagcaaactgggaatttctggtgacatagacctcaccagtgcttcatataccatgatataatctgaaaggggcagattaaaaaaaaaaaaaaaagggcggccgctccctatagtgagtcgtattaagcttaattagctgagcttggactcctgttgatagatccagtaatgacctcanaactccatctggatttgttcanaacgctcggttgccgccgggcgttttttattggtgagaatccaagctagcttggcgagattttcaggagctaaggaagctaaaatggaaaaaaaaaatcactggatataccaccgttgatatatcccaatggcatcgtaaagaacattttngaggcatttcagtcagttgctcaatgtacctataaccaaaccgttcactgganntnacggccttttttaaaaaccgtaaanaaaaaaaaancanaagttttacccggcctttattcnattctngcccncctgagaangcncatccggaatttctatggnantgaaaaangggganctggggaaatgggaaanggttcncccttgttacccngttttccnagaanaantgaaaacntttttcccctntggaggaaaacnccaaaaattc

SEQ ID NO: 66 - DNA, 256 bp, Homo Sapiens
  misc_feature (1)..(1): n is a, c, g, or t
nactatgagaggatcgcatcaccatcaccatcacggatcctatttaggtgacactatagaatcgtcgacccacgcgtccgcccacgcgtccgggcgacagcgggtcggcgggccgcaggagggggtcatgggtaaagactactaccagacgttgggcctggcccgcggcgcgtcggacgaggagatcaagcgggcctaccgccgccaggcgctgcgctaccacccggacaagaacaaggagcccggcgccgaggag

SEQ ID NO: 67 - DNA, 256 bp, Homo Sapiens
cggaggacgagctggcccgcgactggaccaagcggcgcatgaaggatgaccttgtgcccgagaccgcacggctcaactacactcgaccagggctccccacgctgaacccccagctgctagaggcatggaagaatgaagtgaaggagaaaggccacgtcaactgtcccaacgactgctgtgaagccatctactccagcgtgtccggactcaaggctcatctcgccagctgcagtaagggggcccacctggcagggaa

SEQ ID NO: 68 - DNA, 256 bp, Homo Sapiens
  misc_feature (2)..(2): n is a, c, g, or t
tnaactatgagaggatcgcatcaccatcaccatcacggatcctatttaggtgacactatagaatcgtcgacccacgcgtccgatgctgagctggctactggcacacctcctgtatcaccctccaaactcggcaaccctgagcagatgctgagggggcaaccggcgctccccagacccccaacgtcagtggggcctgcttccccgcagtgtccaggagagaaggggcagggggctcccgccgaggctcccatcatcc

SEQ ID NO: 69 - DNA, 256 bp, Homo Sapiens
cccgaagcgcctgtctacgcgaacctgagcagctacgcgggcggcgccgggggcgcggggggcgccgcgacggtcgccttcgctgccgaacctgtgcccttcccgccgccgccacccccaggcgcgttggggccgccgcgcctggctgcgctcaaggacgagccacagacggtgcccgacgtgccgagcttcggcgagagcccgccgttgtcgcccatcgacatggacacgcaggagcgcatcaaggcggagcgca

SEQ ID NO: 70 - DNA, 256 bp, Homo Sapiens
ggacgcgtgggcgagcggggggagctggccaacgaggtgaaggtgctgctgcagggcaaaggggactcggagcacaagcgcaagaaagtggaggcgcagctgcaggagctgcaggtcaagttcaacgagggagagcgcgtgcgcacagagctggccgacaaggtcaccaagctgcaggtggagctggacaacgtgaccgggcttctcagccagtccgacagcaagtccagcaagctcaccaaggacttctccgcgc

SEQ ID NO: 71 - DNA, 256 bp, Homo Sapiens
  misc_feature (2)..(2): n is a, c, g, or t
  misc_feature (4)..(4): n is a, c, g, or t
tnangaggagaattaactatgagaggatcgcatcaccatcaccatcacggatcctatttaggtgacactatagaatcgtcgacccacgcgtccgggaagaatttggtcaaaaaatgcttagaactctttactgaactggcggaagataaagagaactacaagaaattctatgagcagttctctaaaaacataaagcttggaatacacgaagactctcaaaatcggaagaagctttcagagctgttaaggtactaca

SEQ ID NO: 72 - DNA, 256 bp, Homo Sapiens
  misc_feature (2)..(2): n is a, c, g, or t
  misc_feature (10)..(10): n is a, c, g, or t
  misc_feature (13)..(13): n is a, c, g, or t
  misc_feature (27)..(27): n is a, c, g, or t
  misc_feature (38)..(38): n is a, c, g, or t
  misc_feature (44)..(44): n is a, c, g, or t
  misc_feature (50)..(50): n is a, c, g, or t
  misc_feature (56)..(57): n is a, c, g, or t
  misc_feature (67)..(67): n is a, c, g, or t
  misc_feature (73)..(73): n is a, c, g, or t
  misc_feature (79)..(79): n is a, c, g, or t
  misc_feature (89)..(89): n is a, c, g, or t
  misc_feature (93)..(93): n is a, c, g, or t
  misc_feature (98)..(98): n is a, c, g, or t
  misc_feature (100)..(100): n is a, c, g, or t
  misc_feature (152)..(152): n is a, c, g, or t
  misc_feature (165)..(166): n is a, c, g, or t
  misc_feature (177)..(177): n is a, c, g, or t
tngcaaaatngancctaaaaccccaanttgtggggccnaaaaantatttntgaagnngtttcgcatnaccatnaccatncacggtttcntatntaggngncactatagaaaagtcgacccacgcgtccgagaagattaaggaaaagtacatngatcaagaagagnncaacaaaacanagcccatctggaccagaaatcccgacgatattactaatgaggagtacggagaattctataagagcttgaccaatgactg

SEQ ID NO: 73 - DNA, 1349 bp, Homo Sapiens
  misc_feature (1)..(1): n is a, c, g, or t
  misc_feature (804)..(804): n is a, c, g, or t
  misc_feature (899)..(899): n is a, c, g, or t
  misc_feature (906)..(906): n is a, c, g, or t
  misc_feature (918)..(918): n is a, c, g, or t
  misc_feature (923)..(923): n is a, c, g, or t
  misc_feature (927)..(927): n is a, c, g, or t
  misc_feature (935)..(935): n is a, c, g, or t
  misc_feature (937)..(938): n is a, c, g, or t
  misc_feature (946)..(946): n is a, c, g, or t
  misc_feature (950)..(950): n is a, c, g, or t
  misc_feature (960)..(960): n is a, c, g, or t
  misc_feature (965)..(965): n is a, c, g, or t
  misc_feature (972)..(973): n is a, c, g, or t
  misc_feature (976)..(976): n is a, c, g, or t
  misc_feature (999)..(999): n is a, c, g, or t
  misc_feature (1002)..(1002): n is a, c, g, or t
  misc_feature (1007)..(1007): n is a, c, g, or t
  misc_feature (1009)..(1009): n is a, c, g, or t
  misc_feature (1013)..(1014): n is a, c, g, or t
  misc_feature (1016)..(1016): n is a, c, g, or t
  misc_feature (1024)..(1024): n is a, c, g, or t
  misc_feature (1026)..(1026): n is a, c, g, or t
  misc_feature (1028)..(1028): n is a, c, g, or t
  misc_feature (1031)..(1031): n is a, c, g, or t
  misc_feature (1038)..(1038): n is a, c, g, or t
  misc_feature (1047)..(1047): n is a, c, g, or t
  misc_feature (1050)..(1050): n is a, c, g, or t
  misc_feature (1059)..(1059): n is a, c, g, or t
  misc_feature (1062)..(1062): n is a, c, g, or t
  misc_feature (1064)..(1064): n is a, c, g, or t
  misc_feature (1066)..(1068): n is a, c, g, or t
  misc_feature (1081)..(1081): n is a, c, g, or t
  misc_feature (1083)..(1085): n is a, c, g, or t
  misc_feature (1108)..(1109): n is a, c, g, or t
  misc_feature (1119)..(1120): n is a, c, g, or t
  misc_feature (1122)..(1123): n is a, c, g, or t
  misc_feature (1127)..(1127): n is a, c, g, or t
  misc_feature (1131)..(1133): n is a, c, g, or t
  misc_feature (1139)..(1139): n is a, c, g, or t
  misc_feature (1151)..(1151): n is a, c, g, or t
  misc_feature (1157)..(1157): n is a, c, g, or t
  misc_feature (1160)..(1160): n is a, c, g, or t
  misc_feature (1169)..(1169): n is a, c, g, or t
  misc_feature (1171)..(1171): n is a, c, g, or t
  misc_feature (1175)..(1175): n is a, c, g, or t
  misc_feature (1178)..(1178): n is a, c, g, or t
  misc_feature (1182)..(1184): n is a, c, g, or t
  misc_feature (1186)..(1193): n is a, c, g, or t
  misc_feature (1196)..(1197): n is a, c, g, or t
  misc_feature (1199)..(1200): n is a, c, g, or t
  misc_feature (1203)..(1204): n is a, c, g, or t
  misc_feature (1206)..(1207): n is a, c, g, or t
  misc_feature (1212)..(1213): n is a, c, g, or t
  misc_feature (1225)..(1226): n is a, c, g, or t
  misc_feature (1228)..(1228): n is a, c, g, or t
  misc_feature (1234)..(1234): n is a, c, g, or t
  misc_feature (1237)..(1238): n is a, c, g, or t
  misc_feature (1242)..(1242): n is a, c, g, or t
  misc_feature (1244)..(1245): n is a, c, g, or t
  misc_feature (1247)..(1247): n is a, c, g, or t
  misc_feature (1249)..(1250): n is a, c, g, or t
  misc_feature (1254)..(1269): n is a, c, g, or t
  misc_feature (1274)..(1277): n is a, c, g, or t
  misc_feature (1279)..(1282): n is a, c, g, or t
  misc_feature (1289)..(1294): n is a, c, g, or t
  misc_feature (1302)..(1303): n is a, c, g, or t
  misc_feature (1305)..(1306): n is a, c, g, or t
  misc_feature (1310)..(1311): n is a, c, g, or t
  misc_feature (1313)..(1321): n is a, c, g, or t
  misc_feature (1326)..(1331): n is a, c, g, or t
  misc_feature (1334)..(1336): n is a, c, g, or t
  misc_feature (1338)..(1349): n is a, c, g, or t
naaatagagaaattactatgagaggatcgcatcaccatcaccatcacggatcctatttaggtgacactatagaatcgtcgacccacgcgtccggtgaagcagagcttcctgaccgaggtggagcagctgtccaggtttcgtcacccaaacattgtggactttgctggctactgtgctcagaacggcttctactgcctggtgtacggcttcctgcccaacggctccctggaggaccgtctccactgccagacccaggcctgcccacctctctcctggcctcagcgactggacatccttctgggtacagcccgggcaattcagtttctacatcaggacagccccagcctcatccatggagacatcaagagttccaacgtccttctggatgagaggctgacacccaagctgggagactttggcctggcccggttcagccgctttgccgggtccagccccagccagagcagcatggtggcccggacacagacagtgcggggcaccctggcctacctgcccgaggagtacatcaagacgggaaggctggctgtggacacggacaccttcagctttggggtggtagtgctagagaccttggctggtcagagggctgtgaagacgcacggtgccaggaccaagtatctgaaagacctggtggaagaggaggctgaggaggctggagtggctttgagaagcacccagagcacactgcaagcaggtctggctgcagatgcctgggctgctcccatcgccatgcagatctacaagaagcacctggaccccaggcccgggccctgcccacctganctgggcctgggcctgggccactggcctgctgctgcctgcaccgccgggccaaaaggaggcctcctatgacccaaggaaaactcctacgtgtccancactggnaaaacccacagnggggntgcntccatggnanncccctggnaacnccatcagganccagngcccaannaancaaaaaactgcaaaaagccccancancccgngnaaannanaaaaaccnangnggnctcttgntggcctggnctntggaaattnaancnannntgcctctgggacnannncccttaaggaagccggtttcccnnggggaaaacnnannaaanccannngggaanggcccaaaaccnccccanccnggaaaaaangncttngantttnnntnnnnnnnnaanncnnaannanntaccnncccaaaaaaaanncnaaaatnccnnaaananngncnnaaannnnnnnnnnnnnnnnccccnnnntnnnnaaaaaannnnnncaaaaaannannaaannannnnnnnnnacccnnnnnnaannntnnnnnnnnnnnn

SEQ ID NO: 74 - DNA, 256 bp, Homo Sapiens
  misc_feature (5)..(5): n is a, c, g, or t
  misc_feature (10)..(10): n is a, c, g, or t
  misc_feature (18)..(18): n is a, c, g, or t
  misc_feature (48)..(48): n is a, c, g, or t
  misc_feature (50)..(51): n is a, c, g, or t
  misc_feature (56)..(56): n is a, c, g, or t
  misc_feature (59)..(59): n is a, c, g, or t
  misc_feature (66)..(66): n is a, c, g, or t
  misc_feature (73)..(73): n is a, c, g, or t
  misc_feature (87)..(87): n is a, c, g, or t
  misc_feature (89)..(89): n is a, c, g, or t
  misc_feature (100)..(100): n is a, c, g, or t
  misc_feature (105)..(106): n is a, c, g, or t
  misc_feature (113)..(113): n is a, c, g, or t
  misc_feature (125)..(125): n is a, c, g, or t
  misc_feature (128)..(128): n is a, c, g, or t
  misc_feature (164)..(166): n is a, c, g, or t
  misc_feature (170)..(170): n is a, c, g, or t
  misc_feature (179)..(180): n is a, c, g, or t
  misc_feature (183)..(183): n is a, c, g, or t
  misc_feature (191)..(191): n is a, c, g, or t
  misc_feature (194)..(195): n is a, c, g, or t
  misc_feature (198)..(198): n is a, c, g, or t
  misc_feature (200)..(200): n is a, c, g, or t
  misc_feature (203)..(203): n is a, c, g, or t
  misc_feature (205)..(206): n is a, c, g, or t
  misc_feature (208)..(208): n is a, c, g, or t
  misc_feature (211)..(211): n is a, c, g, or t
  misc_feature (213)..(213): n is a, c, g, or t
  misc_feature (216)..(216): n is a, c, g, or t
  misc_feature (223)..(223): n is a, c, g, or t
  misc_feature (227)..(227): n is a, c, g, or t
  misc_feature (235)..(235): n is a, c, g, or t
  misc_feature (238)..(238): n is a, c, g, or t
  misc_feature (247)..(248): n is a, c, g, or t
  misc_feature (252)..(252): n is a, c, g, or t
tttantaganataattantatggggaggatcgcatcaccactcaccantnncgtgnatntttattnaggtganacatatagaatcgncncacccacgcgntccgnncggcgtncctgcagttacnggngaccgcgccccgccgaccgccacgcaacgctccgannnatgntagtcccgnnacncgacggtnccnntancnaancnncnccncnggnatgcganaggncgaccttncanaagacctgnngttntgtg

SEQ ID NO: 75 - DNA, 1402 bp, Homo Sapiens
  misc_feature (4)..(5): n is a, c, g, or t
  misc_feature (7)..(7): n is a, c, g, or t
  misc_feature (11)..(11): n is a, c, g, or t
  misc_feature (75)..(77): n is a, c, g, or t
  misc_feature (82)..(82): n is a, c, g, or t
  misc_feature (115)..(115): n is a, c, g, or t
  misc_feature (118)..(118): n is a, c, g, or t
  misc_feature (121)..(123): n is a, c, g, or t
  misc_feature (190)..(190): n is a, c, g, or t
  misc_feature (207)..(207): n is a, c, g, or t
  misc_feature (210)..(210): n is a, c, g, or t
  misc_feature (231)..(231): n is a, c, g, or t
  misc_feature (271)..(271): n is a, c, g, or t
  misc_feature (277)..(277): n is a, c, g, or t
  misc_feature (292)..(292): n is a, c, g, or t
  misc_feature (303)..(303): n is a, c, g, or t
  misc_feature (312)..(312): n is a, c, g, or t
  misc_feature (320)..(320): n is a, c, g, or t
  misc_feature (336)..(336): n is a, c, g, or t
  misc_feature (344)..(344): n is a, c, g, or t
  misc_feature (355)..(355): n is a, c, g, or t
  misc_feature (358)..(359): n is a, c, g, or t
  misc_feature (364)..(364): n is a, c, g, or t
  misc_feature (367)..(367): n is a, c, g, or t
  misc_feature (370)..(370): n is a, c, g, or t
  misc_feature (379)..(379): n is a, c, g, or t
  misc_feature (381)..(382): n is a, c, g, or t
  misc_feature (389)..(389): n is a, c, g, or t
  misc_feature (395)..(395): n is a, c, g, or t
  misc_feature (398)..(398): n is a, c, g, or t
  misc_feature (407)..(407): n is a, c, g, or t
  misc_feature (428)..(428): n is a, c, g, or t
  misc_feature (448)..(448): n is a, c, g, or t
  misc_feature (450)..(450): n is a, c, g, or t
  misc_feature (460)..(463): n is a, c, g, or t
  misc_feature (470)..(470): n is a, c, g, or t
  misc_feature (474)..(474): n is a, c, g, or t
  misc_feature (480)..(480): n is a, c, g, or t
  misc_feature (485)..(486): n is a, c, g, or t
  misc_feature (491)..(491): n is a, c, g, or t
  misc_feature (493)..(493): n is a, c, g, or t
  misc_feature (498)..(500): n is a, c, g, or t
  misc_feature (506)..(506): n is a, c, g, or t
  misc_feature (515)..(515): n is a, c, g, or t
  misc_feature (522)..(522): n is a, c, g, or t
  misc_feature (526)..(527): n is a, c, g, or t
  misc_feature (532)..(533): n is a, c, g, or t
  misc_feature (539)..(539): n is a, c, g, or t
  misc_feature (542)..(542): n is a, c, g, or t
  misc_feature (548)..(548): n is a, c, g, or t
  misc_feature (550)..(550): n is a, c, g, or t
  misc_feature (562)..(562): n is a, c, g, or t
  misc_feature (565)..(565): n is a, c, g, or t
  misc_feature (570)..(570): n is a, c, g, or t
  misc_feature (574)..(575): n is a, c, g, or t
  misc_feature (580)..(580): n is a, c, g, or t
  misc_feature (583)..(583): n is a, c, g, or t
  misc_feature (591)..(591): n is a, c, g, or t
  misc_feature (598)..(598): n is a, c, g, or t
  misc_feature (600)..(600): n is a, c, g, or t
  misc_feature (602)..(602): n is a, c, g, or t
  misc_feature (610)..(611): n is a, c, g, or t
  misc_feature (621)..(621): n is a, c, g, or t
  misc_feature (626)..(626): n is a, c, g, or t
  misc_feature (638)..(638): n is a, c, g, or t
  misc_feature (646)..(646): n is a, c, g, or t
  misc_feature (651)..(652): n is a, c, g, or t
  misc_feature (654)..(654): n is a, c, g, or t
  misc_feature (665)..(665): n is a, c, g, or t
  misc_feature (668)..(668): n is a, c, g, or t
  misc_feature (676)..(676): n is a, c, g, or t
  misc_feature (681)..(681): n is a, c, g, or t
  misc_feature (686)..(686): n is a, c, g, or t
  misc_feature (690)..(690): n is a, c, g, or t
  misc_feature (693)..(693): n is a, c, g, or t
  misc_feature (695)..(695): n is a, c, g, or t
  misc_feature (697)..(698): n is a, c, g, or t
  misc_feature (701)..(701): n is a, c, g, or t
  misc_feature (711)..(711): n is a, c, g, or t
  misc_feature (717)..(717): n is a, c, g, or t
  misc_feature (720)..(720): n is a, c, g, or t
  misc_feature (722)..(722): n is a, c, g, or t
  misc_feature (725)..(725): n is a, c, g, or t
  misc_feature (727)..(727): n is a, c, g, or t
  misc_feature (733)..(733): n is a, c, g, or t
  misc_feature (745)..(745): n is a, c, g, or t
  misc_feature (748)..(748): n is a, c, g, or t
  misc_feature (751)..(751): n is a, c, g, or t
  misc_feature (753)..(753): n is a, c, g, or t
  misc_feature (755)..(755): n is a, c, g, or t
  misc_feature (761)..(761): n is a, c, g, or t
  misc_feature (765)..(766): n is a, c, g, or t
  misc_feature (772)..(774): n is a, c, g, or t
  misc_feature (779)..(779): n is a, c, g, or t
  misc_feature (781)..(781): n is a, c, g, or t
  misc_feature (784)..(784): n is a, c, g, or t
  misc_feature (786)..(789): n is a, c, g, or t
  misc_feature (794)..(794): n is a, c, g, or t
  misc_feature (796)..(796): n is a, c, g, or t
  misc_feature (799)..(799): n is a, c, g, or t
  misc_feature (804)..(804): n is a, c, g, or t
  misc_feature (806)..(806): n is a, c, g, or t
  misc_feature (810)..(811): n is a, c, g, or t
  misc_feature (819)..(821): n is a, c, g, or t
  misc_feature (824)..(824): n is a, c, g, or t
  misc_feature (826)..(828): n is a, c, g, or t
  misc_feature (830)..(831): n is a, c, g, or t
  misc_feature (839)..(841): n is a, c, g, or t
  misc_feature (843)..(843): n is a, c, g, or t
  misc_feature (848)..(848): n is a, c, g, or t
  misc_feature (850)..(851): n is a, c, g, or t
  misc_feature (858)..(859): n is a, c, g, or t
  misc_feature (861)..(861): n is a, c, g, or t
  misc_feature (864)..(865): n is a, c, g, or t
  misc_feature (872)..(874): n is a, c, g, or t
  misc_feature (880)..(880): n is a, c, g, or t
  misc_feature (884)..(884): n is a, c, g, or t
  misc_feature (888)..(889): n is a, c, g, or t
  misc_feature (891)..(891): n is a, c, g, or t
  misc_feature (894)..(895): n is a, c, g, or t
  misc_feature (900)..(900): n is a, c, g, or t
  misc_feature (923)..(923): n is a, c, g, or t
  misc_feature (927)..(927): n is a, c, g, or t
  misc_feature (933)..(933): n is a, c, g, or t
  misc_feature (935)..(935): n is a, c, g, or t
  misc_feature (939)..(941): n is a, c, g, or t
  misc_feature (943)..(944): n is a, c, g, or t
  misc_feature (946)..(946): n is a, c, g, or t
  misc_feature (954)..(955): n is a, c, g, or t
  misc_feature (958)..(959): n is a, c, g, or t
  misc_feature (961)..(961): n is a, c, g, or t
  misc_feature (967)..(967): n is a, c, g, or t
  misc_feature (969)..(969): n is a, c, g, or t
  misc_feature (971)..(974): n is a, c, g, or t
  misc_feature (977)..(978): n is a, c, g, or t
  misc_feature (981)..(981): n is a, c, g, or t
  misc_feature (985)..(987): n is a, c, g, or t
  misc_feature (991)..(992): n is a, c, g, or t
  misc_feature (995)..(998): n is a, c, g, or t
  misc_feature (1003)..(1003): n is a, c, g, or t
  misc_feature (1005)..(1006): n is a, c, g, or t
  misc_feature (1008)..(1008): n is a, c, g, or t
  misc_feature (1010)..(1011): n is a, c, g, or t
  misc_feature (1013)..(1013): n is a, c, g, or t
  misc_feature (1015)..(1016): n is a, c, g, or t
  misc_feature (1018)..(1018): n is a, c, g, or t
  misc_feature (1023)..(1023): n is a, c, g, or t
  misc_feature (1026)..(1027): n is a, c, g, or t
  misc_feature (1031)..(1032): n is a, c, g, or t
  misc_feature (1034)..(1038): n is a, c, g, or t
  misc_feature (1041)..(1042): n is a, c, g, or t
  misc_feature (1047)..(1047): n is a, c, g, or t
  misc_feature (1051)..(1051): n is a, c, g, or t
  misc_feature (1053)..(1053): n is a, c, g, or t
  misc_feature (1057)..(1057): n is a, c, g, or t
  misc_feature (1062)..(1062): n is a, c, g, or t
  misc_feature (1065)..(1065): n is a, c, g, or t
  misc_feature (1067)..(1067): n is a, c, g, or t
  misc_feature (1070)..(1070): n is a, c, g, or t
  misc_feature (1074)..(1074): n is a, c, g, or t
  misc_feature (1076)..(1076): n is a, c, g, or t
  misc_feature (1078)..(1078): n is a, c, g, or t
  misc_feature (1082)..(1084): n is a, c, g, or t
  misc_feature (1087)..(1089): n is a, c, g, or t
  misc_feature (1092)..(1093): n is a, c, g, or t
  misc_feature (1095)..(1095): n is a, c, g, or t
  misc_feature (1098)..(1100): n is a, c, g, or t
  misc_feature (1105)..(1107): n is a, c, g, or t
  misc_feature (1110)..(1110): n is a, c, g, or t
  misc_feature (1115)..(1115): n is a, c, g, or t
  misc_feature (1121)..(1121): n is a, c, g, or t
  misc_feature (1128)..(1128): n is a, c, g, or t
  misc_feature (1130)..(1130): n is a, c, g, or t
  misc_feature (1134)..(1134): n is a, c, g, or t
  misc_feature (1140)..(1140): n is a, c, g, or t
  misc_feature (1143)..(1143): n is a, c, g, or t
  misc_feature (1150)..(1150): n is a, c, g, or t
  misc_feature (1158)..(1158): n is a, c, g, or t
  misc_feature (1161)..(1163): n is a, c, g, or t
  misc_feature (1165)..(1165): n is a, c, g, or t
  misc_feature (1170)..(1170): n is a, c, g, or t
  misc_feature (1176)..(1176): n is a, c, g, or t
  misc_feature (1178)..(1180): n is a, c, g, or t
  misc_feature (1182)..(1182): n is a, c, g, or t
  misc_feature (1185)..(1190): n is a, c, g, or t
  misc_feature (1192)..(1192): n is a, c, g, or t
  misc_feature (1197)..(1197): n is a, c, g, or t
  misc_feature (1199)..(1199): n is a, c, g, or t
  misc_feature (1201)..(1201): n is a, c, g, or t
  misc_feature (1204)..(1205): n is a, c, g, or t
  misc_feature (1207)..(1207): n is a, c, g, or t
  misc_feature (1209)..(1211): n is a, c, g, or t
  misc_feature (1214)..(1216): n is a, c, g, or t
  misc_feature (1219)..(1219): n is a, c, g, or t
  misc_feature (1224)..(1226): n is a, c, g, or t
  misc_feature (1231)..(1231): n is a, c, g, or t
  misc_feature (1233)..(1233): n is a, c, g, or t
  misc_feature (1236)..(1236): n is a, c, g, or t
  misc_feature (1238)..(1238): n is a, c, g, or t
  misc_feature (1249)..(1249): n is a, c, g, or t
  misc_feature (1256)..(1256): n is a, c, g, or t
  misc_feature (1258)..(1260): n is a, c, g, or t
  misc_feature (1262)..(1263): n is a, c, g, or t
  misc_feature (1266)..(1267): n is a, c, g, or t
  misc_feature (1269)..(1270): n is a, c, g, or t
  misc_feature (1272)..(1272): n is a, c, g, or t
  misc_feature (1274)..(1275): n is a, c, g, or t
  misc_feature (1278)..(1278): n is a, c, g, or t
  misc_feature (1281)..(1281): n is a, c, g, or t
  misc_feature (1285)..(1285): n is a, c, g, or t
  misc_feature (1287)..(1287): n is a, c, g, or t
  misc_feature (1289)..(1289): n is a, c, g, or t
  misc_feature (1291)..(1291): n is a, c, g, or t
  misc_feature (1295)..(1295): n is a, c, g, or t
  misc_feature (1298)..(1298): n is a, c, g, or t
  misc_feature (1300)..(1304): n is a, c, g, or t
  misc_feature (1306)..(1306): n is a, c, g, or t
  misc_feature (1310)..(1311): n is a, c, g, or t
  misc_feature (1313)..(1314): n is a, c, g, or t
  misc_feature (1317)..(1317): n is a, c, g, or t
  misc_feature (1322)..(1322): n is a, c, g, or t
  misc_feature (1325)..(1327): n is a, c, g, or t
  misc_feature (1331)..(1332): n is a, c, g, or t
  misc_feature (1337)..(1337): n is a, c, g, or t
  misc_feature (1339)..(1339): n is a, c, g, or t
  misc_feature (1344)..(1344): n is a, c, g, or t
  misc_feature (1346)..(1348): n is a, c, g, or t
  misc_feature (1350)..(1352): n is a, c, g, or t
  misc_feature (1355)..(1355): n is a, c, g, or t
  misc_feature (1359)..(1360): n is a, c, g, or t
  misc_feature (1362)..(1362): n is a, c, g, or t
  misc_feature (1368)..(1370): n is a, c, g, or t
  misc_feature (1372)..(1372): n is a, c, g, or t
  misc_feature (1374)..(1375): n is a, c, g, or t
  misc_feature (1377)..(1377): n is a, c, g, or t
  misc_feature (1384)..(1385): n is a, c, g, or t
  misc_feature (1387)..(1387): n is a, c, g, or t
  misc_feature (1389)..(1390): n is a, c, g, or t
  misc_feature (1395)..(1398): n is a, c, g, or t
aggnnanaagngagaatactatgagaggatcgcatcaccatcaccatcacgggatcctatttaggtgacaccatnnnaaacnctcgacccacgcgtccgcccacgcgtccgcccnctnaannnccgctgccgtccgcatgctcccgacgcggagcccggagcccgcgccgagcccctggcctcgcggtgncatgctgccccggcggnggngctgaaggatggcgacgccgntgcgtccgccctcccggcggtgccagcggctgctgcggcngctgcnctccggactcggccncggcgccgccntgcgtgganccgccgcnggacacccggaggtangcgcccgncccgggagccnggnntgtgnccngangaggcgggnanngtgaccncctggngcncatgccggngagggcctgctgttcagcccntaaggaggaccagcacgggntntggggggggnnnnaaacacncgcntgccangaggnngacangncccgnnngaactnggaagaggntactganctcnnggacnngggacntgncgaggnanggactccggagngtncaccntccnncccgnacncaaagganccaacgntngncctcccgnnaggccgccancccgngagtctgagcangggagacnggggnnanggaatctgggncgnggccgccngaacnggagnaaantangncnnaanagccaaaaanagcctnagntntgncnctgggntgaaaccggaancgngcngnancagggngggnngacatnnnacccngnggngnnnntttanangcnagacngnaaanngtcccacnnnacngnnncnntgccgctnnncnatggncnnaaagagnnangcnncccgagnnnaaaccnggcntganncnggnnggggngccccaaccccaccaatgcgggngganaaaagncnccgnnnanncnaccacggnnccnncngggcgngnannnnacnngtngggnnncacnngannnnccgcngnngnanntncnngntaaangcnnggtnntnnnnngcnngacgnttantncctnggggnganangancccnancntagnnnggnnnagnntnttnnngggannnganaggcncctagncgggggnanctcncccccnggnggagcgnctcgacgnggnnngnccccncagggntnnngncannnnnntnccaangncnctnntncnnncgnnncgngggannncacancnaancnctaaccggagncccattnannngnncanncnncnannaanagngganancnanggcncancnnnnnangcanntnnccngcgtnatnnncgcnngcaancncagtncnnngnnnaangggnnancgggannnangnngngcacagnntntnnctcannnntgcg

SEQ ID NO: 76 - DNA, 256 bp, Homo Sapiens
atcgggtcttcccgcccctgacctcgctgcctggccccgtctacgagaagtgcatggcaccgccttccgccagctgcctgggggacgcccagctggagagcctgggggcggacaatgagccggagctggaagccgagatgcccgcacaggaggatgacctggagggggtcgtggaggctgtggcctgctttgcctacacgggccgcacagcccaggagctgagcttccggcggggggacgtactgcggctgcacga

SEQ ID NO: 77 - DNA, 1200 bp, Homo Sapiens
  misc_feature (841)..(841): n is a, c, g, or t
  misc_feature (847)..(847): n is a, c, g, or t
  misc_feature (857)..(857): n is a, c, g, or t
  misc_feature (860)..(860): n is a, c, g, or t
  misc_feature (875)..(875): n is a, c, g, or t
  misc_feature (905)..(905): n is a, c, g, or t
  misc_feature (1000)..(1000): n is a, c, g, or t
  misc_feature (1002)..(1002): n is a, c, g, or t
  misc_feature (1006)..(1006): n is a, c, g, or t
  misc_feature (1009)..(1010): n is a, c, g, or t
  misc_feature (1020)..(1020): n is a, c, g, or t
  misc_feature (1031)..(1032): n is a, c, g, or t
  misc_feature (1038)..(1038): n is a, c, g, or t
  misc_feature (1042)..(1042): n is a, c, g, or t
  misc_feature (1063)..(1063): n is a, c, g, or t
  misc_feature (1065)..(1065): n is a, c, g, or t
  misc_feature (1071)..(1071): n is a, c, g, or t
  misc_feature (1074)..(1074): n is a, c, g, or t
  misc_feature (1081)..(1081): n is a, c, g, or t
  misc_feature (1083)..(1083): n is a, c, g, or t
  misc_feature (1090)..(1090): n is a, c, g, or t
  misc_feature (1094)..(1094): n is a, c, g, or t
  misc_feature (1112)..(1113): n is a, c, g, or t
  misc_feature (1117)..(1117): n is a, c, g, or t
  misc_feature (1120)..(1120): n is a, c, g, or t
  misc_feature (1133)..(1133): n is a, c, g, or t
  misc_feature (1143)..(1143): n is a, c, g, or t
  misc_feature (1152)..(1152): n is a, c, g, or t
  misc_feature (1159)..(1159): n is a, c, g, or t
  misc_feature (1164)..(1164): n is a, c, g, or t
  misc_feature (1172)..(1172): n is a, c, g, or t
  misc_feature (1177)..(1177): n is a, c, g, or t
  misc_feature (1179)..(1179): n is a, c, g, or t
  misc_feature (1184)..(1184): n is a, c, g, or t
  misc_feature (1186)..(1186): n is a, c, g, or t
  misc_feature (1198)..(1198): n is a, c, g, or t
tagagaaattactatgagaggatcgcatcaccatcaccatcacggatcctatttaggtgacactatagaatcgtcgacccacgcgtccggcgctatgctatcacccgaggcagagcgagtgctgcggtaccttgtagaagtggaggagctcgccgaggaggtgctggcggacaagcggcagattgtggacctggacactaaaaggaatcagaatcgagagggcctgagggccctgcagaaggatctcagcctctctgaagatgtgatggtttgcttcgggaacatgtttatcaagatgcctcaccctgagacaaaggaaatgattgaaaaagatcaagatcatctggataaagaaatagaaaaactgcggaagcaacttaaagtgaaggtcaaccgcctttttgaggcccaaggcaaaccggagctgaagggttttaacttgaaccccctcaaccaggatgagcttaaagctctcaaggtcatcttgaaaggatgagactcaagaaccaagatgggggaccagcaaccccccagggtcatggaggacccaggaccctccaaccttgacacctgtaaggacaggatctgccctgtaaggggccagccgtcaggaatctggccatgaaaacctctttgtagtgcttggctactctgtgatggcaggagggaaccttcagcctgtctggctgctggacctggacaccagggctcggtggacacaagatctattgacgggccttggtagccaccagtgggtgtgtggggcagtggctgtgggggtgtaagaatgactgcaacaggcacttcccaacaatggcctgctgttcacatggaccctgancaaggnaaggaggganggnaggggcaaaatggantgtcattccagcattcctctcaaaaggganagaggtttttcaggctggtgccatgcgattggaataaaagcaggaggctcatggggtggttgcttgaatgaaaaacaaaaatcttggtgctttgngnctcnccnnagccatctgngggggcaaggnncacccncctncccgcccgcttcaattttgcncntttttnccngcttgantnccaaaanaggngctgcctaacaacccttnngggnccncctctttatttangagggccttnccaaatccntggcccnggccngggggaanggaangnccccntnaccattaaaccngg

SEQ ID NO: 78 - DNA, 256 bp, Homo Sapiens
gcgatgtccagtttgtcctgaggcgcacagggcccagcctagctgggaggccctcctcagacagctgtccacccccggaacgctgcctaattcgtgccagcctccctgtaaagccacgggctgcgctgggctgtgagccccgcaaaacactgacccccgagccagcccccagcctctcacgccctgggcctgcggcccctgtgacacccacaccaggctgctgcacagacctgcggggcctggagctcagagtgca

SEQ ID NO: 79 - DNA, 1200 bp, Homo Sapiens
  misc_feature (783)..(783): n is a, c, g, or t
  misc_feature (790)..(790): n is a, c, g, or t
  misc_feature (818)..(818): n is a, c, g, or t
  misc_feature (849)..(849): n is a, c, g, or t
  misc_feature (858)..(858): n is a, c, g, or t
  misc_feature (886)..(886): n is a, c, g, or t
  misc_feature (892)..(892): n is a, c, g, or t
  misc_feature (903)..(903): n is a, c, g, or t
  misc_feature (911)..(911): n is a, c, g, or t
  misc_feature (921)..(921): n is a, c, g, or t
  misc_feature (924)..(924): n is a, c, g, or t
  misc_feature (928)..(928): n is a, c, g, or t
  misc_feature (952)..(952): n is a, c, g, or t
  misc_feature (957)..(957): n is a, c, g, or t
  misc_feature (988)..(989): n is a, c, g, or t
  misc_feature (992)..(992): n is a, c, g, or t
  misc_feature (997)..(998): n is a, c, g, or t
  misc_feature (1001)..(1001): n is a, c, g, or t
  misc_feature (1006)..(1006): n is a, c, g, or t
  misc_feature (1011)..(1011): n is a, c, g, or t
  misc_feature (1021)..(1021): n is a, c, g, or t
  misc_feature (1025)..(1026): n is a, c, g, or t
  misc_feature (1028)..(1028): n is a, c, g, or t
  misc_feature (1032)..(1032): n is a, c, g, or t
  misc_feature (1040)..(1040): n is a, c, g, or t
  misc_feature (1049)..(1049): n is a, c, g, or t
  misc_feature (1054)..(1054): n is a, c, g, or t
  misc_feature (1056)..(1056): n is a, c, g, or t
  misc_feature (1059)..(1059): n is a, c, g, or t
  misc_feature (1064)..(1064): n is a, c, g, or t
  misc_feature (1075)..(1075): n is a, c, g, or t
  misc_feature (1082)..(1082): n is a, c, g, or t
  misc_feature (1088)..(1088): n is a, c, g, or t
  misc_feature (1095)..(1096): n is a, c, g, or t
  misc_feature (1099)..(1099): n is a, c, g, or t
  misc_feature (1102)..(1104): n is a, c, g, or t
  misc_feature (1119)..(1119): n is a, c, g, or t
  misc_feature (1127)..(1127): n is a, c, g, or t
  misc_feature (1133)..(1133): n is a, c, g, or t
  misc_feature (1136)..(1136): n is a, c, g, or t
  misc_feature (1145)..(1145): n is a, c, g, or t
  misc_feature (1147)..(1148): n is a, c, g, or t
  misc_feature (1160)..(1160): n is a, c, g, or t
  misc_feature (1168)..(1168): n is a, c, g, or t
  misc_feature (1170)..(1170): n is a, c, g, or t
  misc_feature (1174)..(1174): n is a, c, g, or t
  misc_feature (1188)..(1189): n is a, c, g, or t
tagagagaattactatgagaggatcgcatcaccatcaccatcacggatcctatttaggtgacactatagaatcgtcgacccacgcgtccggcccgcgccggccccggtgcccacctccgcgccgcgcggaccctccgagcccgcgctcagacgccccagctccgccgagaggccgcttgcgccgggtccttcttccccaaatgcaggcagagcccccggagccatggccagcccttccggcagctccaaagccactggcaagccccgaggcagggatggccggcccaggagggaggaggacgacgtccctcccgaagagaagaggctgcggctcttgctggaggggggaagcgcacagccccaggactgcgaggacggggaggacgcgccgcggccgggcagggaggagaccggcacccagacaggtggcgacggcagaggaaaagcttatagcttcattgcaccatgtgtggcatttgggcgctgtttggcagtgatgattgcctttctgttcagtgtctgagtgctatgaagattgcacacagaggtccagatgcattccgttttgagaatgtcaatggatacaccaactgctgctttggatttcaccggttggcggtagttgacccgctgtttggaatgcagccaattcgagtgaagaaatatccgtatttgtggctctgttacaatggtgaaatctacaaccataaaaagatgcaacagcattttgaatttgaataccagaccaaagtggatggtgaaataatccttcatctttatganaaaggangaattgagcaaacaaatttgtatgttgnatgggggtgtttgcattttgttttactgganactgccaanaaaaaaagtgttcctggggtaaaaaaanacatantggaagtccanaacttttntttttaaagncantganaaaaaaaatggatttttttggctnttatntttcaaaaaacttaaaagggttttttttaannttnaaaannctnccccnaattncctttttttnaaanngnaaancctttttnttttcttgnaaaananatnaaaanttttggatttnaaacccnaattgnaaaattnnctnccnnnggaaaatggttaaanatattttntgtgtnggnaaaaaaccncnncacccccctttnttaaaaantntganaaaaatttttttcnngtttttaaaaa

SEQ ID NO: 80 - DNA, 1200 bp, Homo Sapiens
  misc_feature (35)..(35): n is a, c, g, or t
  misc_feature (81)..(81): n is a, c, g, or t
  misc_feature (104)..(104): n is a, c, g, or t
  misc_feature (151)..(151): n is a, c, g, or t
  misc_feature (163)..(163): n is a, c, g, or t
  misc_feature (175)..(175): n is a, c, g, or t
  misc_feature (183)..(183): n is a, c, g, or t
  misc_feature (199)..(199): n is a, c, g, or t
  misc_feature (215)..(215): n is a, c, g, or t
  misc_feature (226)..(226): n is a, c, g, or t
  misc_feature (230)..(230): n is a, c, g, or t
  misc_feature (256)..(259): n is a, c, g, or t
  misc_feature (267)..(268): n is a, c, g, or t
  misc_feature (273)..(273): n is a, c, g, or t
  misc_feature (285)..(285): n is a, c, g, or t
  misc_feature (288)..(288): n is a, c, g, or t
  misc_feature (290)..(291): n is a, c, g, or t
  misc_feature (293)..(294): n is a, c, g, or t
  misc_feature (297)..(300): n is a, c, g, or t
  misc_feature (309)..(309): n is a, c, g, or t
  misc_feature (313)..(313): n is a, c, g, or t
  misc_feature (317)..(317): n is a, c, g, or t
  misc_feature (330)..(332): n is a, c, g, or t
  misc_feature (341)..(341): n is a, c, g, or t
  misc_feature (344)..(344): n is a, c, g, or t
  misc_feature (350)..(351): n is a, c, g, or t
  misc_feature (358)..(358): n is a, c, g, or t
  misc_feature (371)..(371): n is a, c, g, or t
  misc_feature (376)..(377): n is a, c, g, or t
  misc_feature (382)..(382): n is a, c, g, or t
  misc_feature (384)..(385): n is a, c, g, or t
  misc_feature (391)..(391): n is a, c, g, or t
  misc_feature (396)..(397): n is a, c, g, or t
  misc_feature (403)..(403): n is a, c, g, or t
  misc_feature (406)..(406): n is a, c, g, or t
  misc_feature (418)..(419): n is a, c, g, or t
  misc_feature (424)..(424): n is a, c, g, or t
  misc_feature (431)..(431): n is a, c, g, or t
  misc_feature (435)..(435): n is a, c, g, or t
  misc_feature (442)..(442): n is a, c, g, or t
  misc_feature (452)..(452): n is a, c, g, or t
  misc_feature (454)..(455): n is a, c, g, or t
  misc_feature (458)..(458): n is a, c, g, or t
  misc_feature (472)..(472): n is a, c, g, or t
  misc_feature (474)..(474): n is a, c, g, or t
  misc_feature (479)..(480): n is a, c, g, or t
  misc_feature (482)..(483): n is a, c, g, or t
  misc_feature (492)..(493): n is a, c, g, or t
  misc_feature (496)..(496): n is a, c, g, or t
  misc_feature (499)..(499): n is a, c, g, or t
  misc_feature (504)..(504): n is a, c, g, or t
  misc_feature (508)..(508): n is a, c, g, or t
  misc_feature (510)..(510): n is a, c, g, or t
  misc_feature (513)..(515): n is a, c, g, or t
  misc_feature (524)..(524): n is a, c, g, or t
  misc_feature (526)..(528): n is a, c, g, or t
  misc_feature (530)..(530): n is a, c, g, or t
  misc_feature (534)..(534): n is a, c, g, or t
  misc_feature (536)..(536): n is a, c, g, or t
  misc_feature (540)..(540): n is a, c, g, or t
  misc_feature (542)..(542): n is a, c, g, or t
  misc_feature (544)..(544): n is a, c, g, or t
  misc_feature (550)..(550): n is a, c, g, or t
  misc_feature (552)..(552): n is a, c, g, or t
  misc_feature (554)..(554): n is a, c, g, or t
  misc_feature (557)..(560): n is a, c, g, or t
  misc_feature (564)..(565): n is a, c, g, or t
  misc_feature (569)..(569): n is a, c, g, or t
  misc_feature (580)..(580): n is a, c, g, or t
  misc_feature (582)..(582): n is a, c, g, or t
  misc_feature (590)..(590): n is a, c, g, or t
  misc_feature (594)..(595): n is a, c, g, or t
  misc_feature (610)..(610): n is a, c, g, or t
  misc_feature (621)..(621): n is a, c, g, or t
  misc_feature (634)..(634): n is a, c, g, or t
  misc_feature (648)..(648): n is a, c, g, or t
  misc_feature (651)..(651): n is a, c, g, or t
  misc_feature (653)..(653): n is a, c, g, or t
  misc_feature (658)..(658): n is a, c, g, or t
  misc_feature (670)..(670): n is a, c, g, or t
  misc_feature (673)..(673): n is a, c, g, or t
  misc_feature (675)..(675): n is a, c, g, or t
  misc_feature (681)..(682): n is a, c, g, or t
  misc_feature (685)..(689): n is a, c, g, or t
  misc_feature (693)..(694): n is a, c, g, or t
  misc_feature (698)..(698): n is a, c, g, or t
  misc_feature (702)..(703): n is a, c, g, or t
  misc_feature (712)..(712): n is a, c, g, or t
  misc_feature (719)..(719): n is a, c, g, or t
  misc_feature (722)..(722): n is a, c, g, or t
  misc_feature (741)..(741): n is a, c, g, or t
  misc_feature (745)..(745): n is a, c, g, or t
  misc_feature (749)..(749): n is a, c, g, or t
  misc_feature (752)..(753): n is a, c, g, or t
  misc_feature (759)..(759): n is a, c, g, or t
  misc_feature (761)..(761): n is a, c, g, or t
  misc_feature (775)..(777): n is a, c, g, or t
  misc_feature (784)..(784): n is a, c, g, or t
  misc_feature (794)..(795): n is a, c, g, or t
  misc_feature (801)..(801): n is a, c, g, or t
  misc_feature (803)..(803): n is a, c, g, or t
  misc_feature (806)..(806): n is a, c, g, or t
  misc_feature (810)..(810): n is a, c, g, or t
  misc_feature (812)..(812): n is a, c, g, or t
  misc_feature (815)..(815): n is a, c, g, or t
  misc_feature (817)..(817): n is a, c, g, or t
  misc_feature (823)..(823): n is a, c, g, or t
  misc_feature (827)..(829): n is a, c, g, or t
  misc_feature (835)..(836): n is a, c, g, or t
  misc_feature (842)..(842): n is a, c, g, or t
  misc_feature (844)..(844): n is a, c, g, or t
  misc_feature (854)..(854): n is a, c, g, or t
  misc_feature (858)..(858): n is a, c, g, or t
  misc_feature (862)..(862): n is a, c, g, or t
  misc_feature (875)..(875): n is a, c, g, or t
  misc_feature (881)..(881): n is a, c, g, or t
  misc_feature (883)..(883): n is a, c, g, or t
  misc_feature (887)..(887): n is a, c, g, or t
  misc_feature (895)..(895): n is a, c, g, or t
  misc_feature (898)..(898): n is a, c, g, or t
  misc_feature (900)..(900): n is a, c, g, or t
  misc_feature (907)..(907): n is a, c, g, or t
  misc_feature (910)..(911): n is a, c, g, or t
  misc_feature (915)..(915): n is a, c, g, or t
  misc_feature (917)..(917): n is a, c, g, or t
  misc_feature (919)..(922): n is a, c, g, or t
  misc_feature (924)..(924): n is a, c, g, or t
  misc_feature (926)..(926): n is a, c, g, or t
  misc_feature (935)..(935): n is a, c, g, or t
  misc_feature (940)..(942): n is a, c, g, or t
  misc_feature (944)..(944): n is a, c, g, or t
  misc_feature (949)..(949): n is a, c, g, or t
  misc_feature (956)..(957): n is a, c, g, or t
  misc_feature (965)..(965): n is a, c, g, or t
  misc_feature (969)..(969): n is a, c, g, or t
  misc_feature (972)..(972): n is a, c, g, or t
  misc_feature (983)..(983): n is a, c, g, or t
  misc_feature (985)..(985): n is a, c, g, or t
  misc_feature (990)..(990): n is a, c, g, or t
  misc_feature (992)..(992): n is a, c, g, or t
  misc_feature (996)..(996): n is a, c, g, or t
  misc_feature (999)..(999): n is a, c, g, or t
  misc_feature (1010)..(1010): n is a, c, g, or t
  misc_feature (1015)..(1015): n is a, c, g, or t
  misc_feature (1020)..(1020): n is a, c, g, or t
  misc_feature (1024)..(1024): n is a, c, g, or t
  misc_feature (1030)..(1030): n is a, c, g, or t
  misc_feature (1033)..(1033): n is a, c, g, or t
  misc_feature (1036)..(1036): n is a, c, g, or t
  misc_feature (1038)..(1038): n is a, c, g, or t
  misc_feature (1040)..(1044): n is a, c, g, or t
  misc_feature (1056)..(1056): n is a, c, g, or t
  misc_feature (1062)..(1062): n is a, c, g, or t
  misc_feature (1074)..(1074): n is a, c, g, or t
  misc_feature (1078)..(1078): n is a, c, g, or t
  misc_feature (1080)..(1080): n is a, c, g, or t
  misc_feature (1083)..(1083): n is a, c, g, or t
  misc_feature (1092)..(1092): n is a, c, g, or t
  misc_feature (1096)..(1096): n is a, c, g, or t
  misc_feature (1099)..(1099): n is a, c, g, or t
  misc_feature (1102)..(1102): n is a, c, g, or t
  misc_feature (1105)..(1105): n is a, c, g, or t
  misc_feature (1108)..(1108): n is a, c, g, or t
  misc_feature (1111)..(1112): n is a, c, g, or t
  misc_feature (1114)..(1114): n is a, c, g, or t
  misc_feature (1116)..(1116): n is a, c, g, or t
  misc_feature (1118)..(1121): n is a, c, g, or t
  misc_feature (1125)..(1125): n is a, c, g, or t
  misc_feature (1127)..(1127): n is a, c, g, or t
  misc_feature (1129)..(1130): n is a, c, g, or t
  misc_feature (1133)..(1133): n is a, c, g, or t
  misc_feature (1136)..(1136): n is a, c, g, or t
  misc_feature (1138)..(1138): n is a, c, g, or t
  misc_feature (1141)..(1142): n is a, c, g, or t
  misc_feature (1144)..(1145): n is a, c, g, or t
  misc_feature (1148)..(1154): n is a, c, g, or t
  misc_feature (1159)..(1160): n is a, c, g, or t
  misc_feature (1188)..(1188): n is a, c, g, or t
  misc_feature (1190)..(1190): n is a, c, g, or t
  misc_feature (1193)..(1193): n is a, c, g, or t
  misc_feature (1195)..(1195): n is a, c, g, or t
  misc_feature (1197)..(1197): n is a, c, g, or t
  misc_feature (1200)..(1200): n is a, c, g, or t
tagagagaattactatgcagaggatcgcatccccnctcaccatcacggcatcctattttaggtgacactatagaatcgtcnacccaagcgctccgaaaaaaagncaccctgcggccggggccggagctggagccgccgctgccgccgccgncgcggccgatcnggagctcccccncgcggacnatgcctgccgtgcccncctggggctcggggcngtgaggtccgnggcncggggtagctatggcgacagaaatcnnnntccgaggnnccgcntgacaagtgtgngcncnngnngcnnnngcgtggagnagcntgtncaccaagggaggnnngggttcggncgngccctnntacagcnagacccgcgagangttgnngctgnanntttatnagaanntgctgnacntctttgccaatnnatcancccatancttnctgtctnagcgtcttangnnacntgtactgcgcggancntgaannannagaggactnnaancantttcncaangncannncattacatnannntngtgntncagncncncccaancncnttnnnngcannatgntttcagatgananttgaaccnctannatatatgtgggctgncttattccagnccttcatgtcatnttccttatcaaatnggncnccacncaccatcatgcngangnggattnngcnnnnnacanntctntctnntgtccaatncctttcntanatgattttatgaagacatncttnacangcnntggganantcccgagtgatggnnnaacccanagtaaagggnnacaccntncancctnanaananccaaangggnnntcctcnncatatntnctttagacgnaatncatntcccctttcccantttccntnttcntttctaancantncctttcnttnnaaantnannnncntnaaattatgngcttnnnanctgtnctcccannggaaaatnaaanctnctatattttcntntttancngganttntaatacctaancctgnaaatnaatntatccntcnttnancnnnnnacaatatttgtnggaatntcccctattttnttgnanaanatttatatntttnttnacnccnatnccnncngnannnnaganantnntanatncntanncnnccnnnnnnncaaanncctgtttttcctaacatataatattttncnttntntnccn

SEQ ID NO: 81 - DNA, 1383 bp, Homo Sapiens
  misc_feature (1)..(1): n is a, c, g, or t
  misc_feature (862)..(862): n is a, c, g, or t
  misc_feature (902)..(902): n is a, c, g, or t
  misc_feature (915)..(915): n is a, c, g, or t
  misc_feature (954)..(954): n is a, c, g, or t
  misc_feature (959)..(959): n is a, c, g, or t
  misc_feature (964)..(964): n is a, c, g, or t
  misc_feature (983)..(983): n is a, c, g, or t
  misc_feature (993)..(994): n is a, c, g, or t
  misc_feature (999)..(999): n is a, c, g, or t
  misc_feature (1002)..(1002): n is a, c, g, or t
  misc_feature (1013)..(1013): n is a, c, g, or t
  misc_feature (1028)..(1028): n is a, c, g, or t
  misc_feature (1032)..(1032): n is a, c, g, or t
  misc_feature (1038)..(1038): n is a, c, g, or t
  misc_feature (1040)..(1040): n is a, c, g, or t
  misc_feature (1049)..(1049): n is a, c, g, or t
  misc_feature (1053)..(1053): n is a, c, g, or t
  misc_feature (1055)..(1056): n is a, c, g, or t
  misc_feature (1058)..(1058): n is a, c, g, or t
  misc_feature (1067)..(1067): n is a, c, g, or t
  misc_feature (1069)..(1069): n is a, c, g, or t
  misc_feature (1072)..(1072): n is a, c, g, or t
  misc_feature (1075)..(1075): n is a, c, g, or t
  misc_feature (1080)..(1082): n is a, c, g, or t
  misc_feature (1084)..(1084): n is a, c, g, or t
  misc_feature (1086)..(1087): n is a, c, g, or t
  misc_feature (1090)..(1090): n is a, c, g, or t
  misc_feature (1100)..(1100): n is a, c, g, or t
  misc_feature (1108)..(1109): n is a, c, g, or t
  misc_feature (1112)..(1112): n is a, c, g, or t
  misc_feature (1116)..(1117): n is a, c, g, or t
  misc_feature (1127)..(1128): n is a, c, g, or t
  misc_feature (1135)..(1135): n is a, c, g, or t
  misc_feature (1143)..(1143): n is a, c, g, or t
  misc_feature (1151)..(1151): n is a, c, g, or t
  misc_feature (1155)..(1155): n is a, c, g, or t
  misc_feature (1162)..(1164): n is a, c, g, or t
  misc_feature (1174)..(1175): n is a, c, g, or t
  misc_feature (1182)..(1182): n is a, c, g, or t
  misc_feature (1184)..(1184): n is a, c, g, or t
  misc_feature (1188)..(1188): n is a, c, g, or t
  misc_feature (1190)..(1190): n is a, c, g, or t
  misc_feature (1192)..(1192): n is a, c, g, or t
  misc_feature (1197)..(1197): n is a, c, g, or t
  misc_feature (1199)..(1199): n is a, c, g, or t
  misc_feature (1209)..(1209): n is a, c, g, or t
  misc_feature (1212)..(1212): n is a, c, g, or t
  misc_feature (1214)..(1214): n is a, c, g, or t
  misc_feature (1216)..(1216): n is a, c, g, or t
  misc_feature (1218)..(1218): n is a, c, g, or t
  misc_feature (1224)..(1224): n is a, c, g, or t
  misc_feature (1228)..(1229): n is a, c, g, or t
  misc_feature (1233)..(1234): n is a, c, g, or t
  misc_feature (1238)..(1238): n is a, c, g, or t
  misc_feature (1245)..(1245): n is a, c, g, or t
  misc_feature (1253)..(1254): n is a, c, g, or t
  misc_feature (1256)..(1256): n is a, c, g, or t
  misc_feature (1260)..(1260): n is a, c, g, or t
  misc_feature (1262)..(1262): n is a, c, g, or t
  misc_feature (1266)..(1268): n is a, c, g, or t
  misc_feature (1272)..(1280): n is a, c, g, or t
  misc_feature (1282)..(1282): n is a, c, g, or t
  misc_feature (1284)..(1284): n is a, c, g, or t
  misc_feature (1290)..(1292): n is a, c, g, or t
  misc_feature (1296)..(1299): n is a, c, g, or t
  misc_feature (1306)..(1306): n is a, c, g, or t
  misc_feature (1311)..(1313): n is a, c, g, or t
  misc_feature (1316)..(1316): n is a, c, g, or t
  misc_feature (1319)..(1321): n is a, c, g, or t
  misc_feature (1326)..(1327): n is a, c, g, or t
  misc_feature (1331)..(1332): n is a, c, g, or t
  misc_feature (1345)..(1345): n is a, c, g, or t
  misc_feature (1350)..(1351): n is a, c, g, or t
  misc_feature (1359)..(1360): n is a, c, g, or t
  misc_feature (1364)..(1366): n is a, c, g, or t
  misc_feature (1368)..(1374): n is a, c, g, or t
  misc_feature (1376)..(1383): n is a, c, g, or t
naatagagaaattactatgagaggatcgcatcaccatcaccatcacggatcctatttaggtgacactatagaatcgtcgacccacgcgtccgggaagagcatgtctggggccagccccaaagagtcaactaatccagagaaggcccatgagactcttcatcagtctttatccctggcatcttcccccaaaggaaccattgagaacattttggacaatgacccaagggaccttataggagacttctccaagggttatctctttcatacagttgctgggaaacatcaggatttaaaatacatctctccagaaattatggcatctgttttgaatggcaagtttgccaacctcattaaagagtttgttatcatcgactgtcgatacccatatgaatacgagggaggccacatcaagggtgcagtgaacttgcacatggaagaagaggttgaagacttcttattgaagaagcccattgtacctactgatggcaagcgtgtcattgttgtgtttcactgcgagttttcttctgagagaggtccccgcatgtgccggtatgtgagagagagagatcgcctgggtaatgaataccccaaactccactaccctgagctgtatgtcctgaaggggggatacaaggagttctttatgaaatgccagtcttactgtgagccccctagctaccggcccatgcaccacgaggactttaaagaagacctgaagaagttccgcaccaagagccggacctgggcaggggagaagagcaagagggagatgtacagtcgtctgaagaagctctgagggcggcaggaccagccagcagcagcccaagcttccctccatccccctttaccctctttgctgcanagaaacttaagcaaaggggacagctgtgtgacatttgganagggggcctgggnacttccatgccttaaacctacctcccacactcccaaggntggancccangggcatcttgctggctacncctcttctgnncctgntanacgtcctccgnccatatcaaaactgngccncaatgnanttctgaacnccgngnnangctgctctnanccnagngggannnancnnccngggccttttngggctccnnccnttcnngaggggaaannaaacggnggggaatnaaaaattncccnaaatgcnnntggccaaaannaaaaaancngggnangnaaggncnttggggaaanccnangntnattttncccnncccnncccnttttttntttttttnnancccngnaaannntttnnnnnnnnnangngaaaannncccnnnnggggggnttttnnnccnggnnnccccnntttnnttaaaaaaaaaanggggnncccccccnngggnnnannnnnnntnnnnnnnn

SEQ ID NO: 82 - DNA, 1200 bp, Homo Sapiens
  misc_feature (830)..(830): n is a, c, g, or t
  misc_feature (832)..(832): n is a, c, g, or t
  misc_feature (847)..(847): n is a, c, g, or t
  misc_feature (885)..(885): n is a, c, g, or t
  misc_feature (888)..(888): n is a, c, g, or t
  misc_feature (903)..(903): n is a, c, g, or t
  misc_feature (906)..(906): n is a, c, g, or t
  misc_feature (921)..(921): n is a, c, g, or t
  misc_feature (939)..(939): n is a, c, g, or t
  misc_feature (954)..(954): n is a, c, g, or t
  misc_feature (972)..(972): n is a, c, g, or t
  misc_feature (975)..(975): n is a, c, g, or t
  misc_feature (986)..(986): n is a, c, g, or t
  misc_feature (1002)..(1002): n is a, c, g, or t
  misc_feature (1007)..(1007): n is a, c, g, or t
  misc_feature (1014)..(1014): n is a, c, g, or t
  misc_feature (1024)..(1024): n is a, c, g, or t
  misc_feature (1027)..(1027): n is a, c, g, or t
  misc_feature (1031)..(1031): n is a, c, g, or t
  misc_feature (1038)..(1038): n is a, c, g, or t
  misc_feature (1050)..(1050): n is a, c, g, or t
  misc_feature (1067)..(1067): n is a, c, g, or t
  misc_feature (1070)..(1070): n is a, c, g, or t
  misc_feature (1084)..(1084): n is a, c, g, or t
  misc_feature (1087)..(1087): n is a, c, g, or t
  misc_feature (1091)..(1091): n is a, c, g, or t
  misc_feature (1096)..(1096): n is a, c, g, or t
  misc_feature (1103)..(1103): n is a, c, g, or t
  misc_feature (1108)..(1108): n is a, c, g, or t
  misc_feature (1112)..(1113): n is a, c, g, or t
  misc_feature (1122)..(1122): n is a, c, g, or t
  misc_feature (1125)..(1125): n is a, c, g, or t
  misc_feature (1129)..(1129): n is a, c, g, or t
  misc_feature (1135)..(1135): n is a, c, g, or t
  misc_feature (1148)..(1148): n is a, c, g, or t
  misc_feature (1155)..(1155): n is a, c, g, or t
  misc_feature (1159)..(1160): n is a, c, g, or t
  misc_feature (1164)..(1164): n is a, c, g, or t
  misc_feature (1169)..(1169): n is a, c, g, or t
  misc_feature (1192)..(1192): n is a, c, g, or t
  misc_feature (1198)..(1198): n is a, c, g, or t
  misc_feature (1200)..(1200): n is a, c, g, or t
tagagaaattactatggagaggatcgcatcaccatcaccatcacggatcctatttaggtgacactatagaatcgtcgacccacgcgtccgctgcgtcgctccgggagctgccgacggacggagcgcccccgcccccgcccggccgcccgcccgccgccgccatgcccttctccaacagccacaacgcactgaagctgcgcttcccggccgaggacgagttccccgacctgagcgcccacaacaaccacatggccaaggtgctgacccccgagctgtacgcggagctgcgcgccaagagcacgccgagcggcttcacgctggacgacgtcatccagacaggcgtggacaacccgggccacccgtacatcatgaccgtgggctgcgtggcgggcgacgaggagtcctacgaagtgttcaaggatctcttcgaccccatcatcgaggaccggcacggcggctacaagcccagcgatgagcacaagaccgacctcaaccccgacaacctgcagggcggcgacgacctggaccccaactacgtgctgagctcgcgggtgcgcacgggccgcagcatccgtggcttctgcctccccccgcactgcagccgcggggagcgccgagccatcgagaagctcgcggtggaagccctgtccagcctggacggcgacctggcgggccgatactacgcgctcaagagcatgacggaggcggagcagcagcagctcatcgacgaccacttcctcttcgacaagcccgtgtcgcccctgctgctggcctcgggcatggcccgcgactggcccgacgcccgcggtatctggcacaatgacaataanancttcctggtgtgggntcaacgaggaggaacacctgcgggtcatctccatgcanaangggggcaacatgaangangtgttcacccgcttntgcaccggcctcacccanattgaaactctcttnaagtctaaggactatganttnatgtggaaccntcactgggctaaatcntcacntgccatncaacttgggnacngggntgcgggnagtgtgcatatnagctgcccaacctgggnaancatgaaaatttttngangtgnttaancggtgcnatttnaaannaagcaaggnggngggnaacggntgcgggggggggnttttaantttnnaagntaacncttggtttttaaaagggaattgntcaaangn

SEQ ID NO: 83 - DNA, 1229 bp, Homo Sapiens
  misc_feature (11)..(11): n is a, c, g, or t
  misc_feature (532)..(532): n is a, c, g, or t
  misc_feature (762)..(762): n is a, c, g, or t
  misc_feature (845)..(845): n is a, c, g, or t
  misc_feature (876)..(876): n is a, c, g, or t
  misc_feature (886)..(886): n is a, c, g, or t
  misc_feature (888)..(888): n is a, c, g, or t
  misc_feature (904)..(904): n is a, c, g, or t
  misc_feature (912)..(912): n is a, c, g, or t
  misc_feature (916)..(916): n is a, c, g, or t
  misc_feature (919)..(919): n is a, c, g, or t
  misc_feature (937)..(937): n is a, c, g, or t
  misc_feature (951)..(952): n is a, c, g, or t
  misc_feature (955)..(955): n is a, c, g, or t
  misc_feature (959)..(959): n is a, c, g, or t
  misc_feature (963)..(963): n is a, c, g, or t
  misc_feature (981)..(981): n is a, c, g, or t
  misc_feature (1004)..(1004): n is a, c, g, or t
  misc_feature (1011)..(1011): n is a, c, g, or t
  misc_feature (1024)..(1024): n is a, c, g, or t
  misc_feature (1026)..(1026): n is a, c, g, or t
  misc_feature (1039)..(1040): n is a, c, g, or t
  misc_feature (1049)..(1049): n is a, c, g, or t
  misc_feature (1054)..(1054): n is a, c, g, or t
  misc_feature (1061)..(1061): n is a, c, g, or t
  misc_feature (1063)..(1063): n is a, c, g, or t
  misc_feature (1072)..(1072): n is a, c, g, or t
  misc_feature (1075)..(1075): n is a, c, g, or t
  misc_feature (1090)..(1090): n is a, c, g, or t
  misc_feature (1102)..(1102): n is a, c, g, or t
  misc_feature (1105)..(1105): n is a, c, g, or t
  misc_feature (1107)..(1107): n is a, c, g, or t
  misc_feature (1120)..(1120): n is a, c, g, or t
  misc_feature (1133)..(1133): n is a, c, g, or t
  misc_feature (1141)..(1141): n is a, c, g, or t
  misc_feature (1146)..(1146): n is a, c, g, or t
  misc_feature (1151)..(1151): n is a, c, g, or t
  misc_feature (1155)..(1155): n is a, c, g, or t
  misc_feature (1157)..(1157): n is a, c, g, or t
  misc_feature (1161)..(1162): n is a, c, g, or t
  misc_feature (1165)..(1165): n is a, c, g, or t
  misc_feature (1168)..(1169): n is a, c, g, or t
  misc_feature (1175)..(1176): n is a, c, g, or t
  misc_feature (1180)..(1182): n is a, c, g, or t
  misc_feature (1187)..(1187): n is a, c, g, or t
  misc_feature (1192)..(1193): n is a, c, g, or t
  misc_feature (1199)..(1204): n is a, c, g, or t
  misc_feature (1209)..(1218): n is a, c, g, or t
  misc_feature (1220)..(1220): n is a, c, g, or t
  misc_feature (1222)..(1222): n is a, c, g, or t
  misc_feature (1225)..(1229): n is a, c, g, or t
taattagaganattactatgagaggatcgcatcaccatcaccatcacggatcctatttaggtgacactatagaatcgtcgacccacgcgtccgagccgacaggggcttccgagcgagcagagtcccgcgccccgcactccatggagcagctgctgcgcgccgagctgcgcaccgcgaccctgcgggccttcggcggccccggcgccggctgcatcagcgagggccgagcctacgacacggacgcaggcccagtgttcgtcaaagtcaaccgcaggacgcaggcccggcagatgtttgagggggaggtggccagcctggaggccctccggagcacgggcctggtgcgggtgccgaggcccatgaaggtcatcgacctgccgggaggtggggccgcctttgtgatggagcatttgaagatgaagagcttgagcagtcaagcatcaaaacttggagagcagatggcagatttgcatctttacaaccagaagctcagggagaagttgaaggaggaggagaacacagtgggccgaanaggtgagggtgctgagcctcagtatgtggacaagttcggcttccacacggtgacgtgctgcggcttcatcccgcaggtgaatgagtggcaggatgactggccgacctttttcgcccggcaccggctccaggcgcagctggacctcattgagaaggactatgctgaccgagaggcacgagaactctggtcccggctacaggtgaagatcccggatctgttttgtggcctanagattgtccccgcgttgctccacggggatctctggtcgggaaacgtggctgaagacgacgtggggcccattatttacgacccnggcttccttctatggccattccgagtttganctggcaatcncnttgatgtttggggggnttccccanatcnttnttccccgcctaccaccgnaagatccccaaggnnccngggnttcnacaagcggctgctgcttnacagttgtttacttcctgaaccnctggaancccttcggggggnantaaagaacccttnnttgggcacnttgcnaaggtgntnaataagggnccntgcctcctttccttntcccgtccccgnttncnttccccgttcttnttccccgtccccntcttgggncccgnccttncccntnttcnnttnccnncccttnntttnnnccccntcccnntttttnnnnnnccccnnnnnnnnnntncnttnnnnn

SEQ ID NO: 84 - DNA, 256 bp, Homo Sapiens
ttaactatgagaggatcgcatcaccatcaccatcacggatcctatttaggtgacactatagaatcgtcgacccacgcgtccggatcctgaaccgcgcggccgaaccctccggtgtcccgacccaggctaagcttgagcatggctgagcaggagcccacagccgagcagctggcccagattgcagcggagaacgaggaggatgagcactcggtcaactacaagcccccggcccagaagagcatccaggagatccagg

SEQ ID NO: 85 - DNA, 256 bp, Homo Sapiens
  misc_feature (2)..(2): n is a, c, g, or t
tnaactatgagaggatcgcatcaccatcaccatcacggatcctatttaggtgacactatagaatcgtcgacccacgcgtccggcgccatggcggaagcagaggagcaggaaactgggtcccttgaagaatctacagatgagtctgaggaagaagagagcgaagaggaacccaagctgaagtatgaaaggctttccaatggggtaactgaaatacttcagaaggatgcagctagctgcatgacagtccatgacaagt

SEQ ID NO: 86 - DNA, 1200 bp, Homo Sapiens
  misc_feature (2)..(2): n is a, c, g, or t
  misc_feature (9)..(9): n is a, c, g, or t
  misc_feature (864)..(864): n is a, c, g, or t
  misc_feature (890)..(892): n is a, c, g, or t
  misc_feature (894)..(894): n is a, c, g, or t
  misc_feature (900)..(901): n is a, c, g, or t
  misc_feature (903)..(903): n is a, c, g, or t
  misc_feature (906)..(911): n is a, c, g, or t
  misc_feature (913)..(920): n is a, c, g, or t
  misc_feature (922)..(922): n is a, c, g, or t
  misc_feature (925)..(928): n is a, c, g, or t
  misc_feature (930)..(932): n is a, c, g, or t
  misc_feature (950)..(950): n is a, c, g, or t
  misc_feature (957)..(957): n is a, c, g, or t
  misc_feature (959)..(959): n is a, c, g, or t
  misc_feature (965)..(965): n is a, c, g, or t
  misc_feature (1003)..(1003): n is a, c, g, or t
  misc_feature (1011)..(1011): n is a, c, g, or t
  misc_feature (1014)..(1014): n is a, c, g, or t
  misc_feature (1016)..(1016): n is a, c, g, or t
  misc_feature (1019)..(1019): n is a, c, g, or t
  misc_feature (1024)..(1025): n is a, c, g, or t
  misc_feature (1046)..(1047): n is a, c, g, or t
  misc_feature (1061)..(1061): n is a, c, g, or t
  misc_feature (1070)..(1070): n is a, c, g, or t
  misc_feature (1076)..(1076): n is a, c, g, or t
  misc_feature (1082)..(1082): n is a, c, g, or t
  misc_feature (1084)..(1084): n is a, c, g, or t
  misc_feature (1086)..(1086): n is a, c, g, or t
  misc_feature (1091)..(1091): n is a, c, g, or t
  misc_feature (1097)..(1097): n is a, c, g, or t
  misc_feature (1109)..(1109): n is a, c, g, or t
  misc_feature (1111)..(1111): n is a, c, g, or t
  misc_feature (1120)..(1120): n is a, c, g, or t
  misc_feature (1137)..(1137): n is a, c, g, or t
  misc_feature (1154)..(1154): n is a, c, g, or t
  misc_feature (1159)..(1160): n is a, c, g, or t
  misc_feature (1166)..(1166): n is a, c, g, or t
  misc_feature (1175)..(1175): n is a, c, g, or t
  misc_feature (1200)..(1200): n is a, c, g, or t
cnatagagnaattactatgagaggatcgcatcaccatcaccatcacggatcctatttaggtgacactatagaatcgtcgacccacgcgttccgctcagaatttaatcaaacaaaattgtgagctttttgagcagcttggagagtacaaattccagaatgcgctattagttcgttacaccaagaaagtaccccaagtgtcaactccaactcttgtagaggtctcaagaaacctaggaaaagtgggcagcaaatgttgtaaacatcctgaagcaaaaagaatgccctgtgcagaagactatctatccgtggtcctgaaccagttatgtgtgttgcatgagaaaacgccagtaagtgacagagtcaccaaatgctgcacagaatccttggtgaacaggcgaccatgcttttcagctctggaagtcgatgaaacatacgttcccaaagagtttaatgctgaaacattcaccttccatgcagatatatgcacactttctgagaaggagagacaaatcaagaaacaaactgcacttgttgagcttgtgaaacacaagcccaaggcaacaaaagagcaactgaaagctgttatggatgatttcgcagcttttgtagagaagtgctgcaaggctgacgataaggagacctgctttgccgaggagggtaaaaaacttgttgctgcaagtcaagctgccttaggcttataacatcacatttaaaagcatctcagcctaccatgagaataagagaaagaaaatgaagatcaaaagcttattcatctgtttttctttttcgttggtgtaaagccaacaccctgtctaaaaaaacataaatttctttaatcattttgcctcttttctctgtgcttcnaattaataaaaaatggaaagaatctnnnanaaaaannanaannnnnnannnnnnnnanaannnnannnggggcggcccccccccanagggagncnattaancttatttaactgaaccttggaccccgtggaaaaatccngtaatganccncnaanccccnnctggatttttttcaaaacccnncggttgcccccggnggttttttntggggnaaaccnancnacctngggganatttccggggcntngggaagctnaaaaggggaaaaaaaancccgggaataccccccnttaannttcccnaggcccccnaaaaaaaatttggggtttccccccn

SEQ ID NO: 87 - DNA, 256 bp, Homo Sapiens
atagagaaaatactatgagaggatcgcatcaccatcaccatcacggatcctatttaggtgacactatagaatcgtcgacccacgcgtccggggacagcgaaatggaggggtgtgtgtctaacctaatggtctgcaacctggcctacagcgggaagctggaagagttgaaggagagtattctggccgataaatccctggctactagaactgaccaggacagcagaactgcattgcactgggcatgctcagctggaca

SEQ ID NO: 88 - DNA, 256 bp, Homo Sapiens
  misc_feature (19)..(19): n is a, c, g, or t
ttattaaagaggagaaatnactctgagaggatcgcatcaccatcaccatcacggatcctatttaggtgacactatagaatcgtcgacccacgcgtccgggggggtgcgagagcaggtgcgtttctatgacacccgggggctccgagatggggccgaactgccccgacactgcttctcttgcactgatggctacgtcctggtctatagcacagatagcagagagtcttttcagcgtgtggagctgctcaagaaggag

SEQ ID NO: 89 - DNA, 256 bp, Homo Sapiens
  misc_feature (1)..(1): n is a, c, g, or t
  misc_feature (3)..(3): n is a, c, g, or t
nanctatgagaggatcgcatcaccatcaccatcacggatcctatttaggtgacactatagaatcgtcgacccacgcgtccgcccacgcgtccgcagagaagtggatccgccgcttgcgccgcatggagtccgaatcggaaagcggggctgctgctgacacccccccactggagaccctaagcttccatggtgatgaagagattatcgaggtggtagaacttgatcccggtccgccggacccagatgacctggccca

SEQ ID NO: 90 - DNA, 1292 bp, Homo Sapiens
  misc_feature (939)..(939): n is a, c, g, or t
  misc_feature (941)..(941): n is a, c, g, or t
  misc_feature (977)..(977): n is a, c, g, or t
  misc_feature (983)..(983): n is a, c, g, or t
  misc_feature (990)..(990): n is a, c, g, or t
  misc_feature (992)..(992): n is a, c, g, or t
  misc_feature (995)..(995): n is a, c, g, or t
  misc_feature (999)..(999): n is a, c, g, or t
  misc_feature (1010)..(1010): n is a, c, g, or t
  misc_feature (1018)..(1018): n is a, c, g, or t
  misc_feature (1026)..(1026): n is a, c, g, or t
  misc_feature (1028)..(1028): n is a, c, g, or t
  misc_feature (1035)..(1035): n is a, c, g, or t
  misc_feature (1037)..(1037): n is a, c, g, or t
  misc_feature (1050)..(1050): n is a, c, g, or t
  misc_feature (1052)..(1052): n is a, c, g, or t
  misc_feature (1076)..(1076): n is a, c, g, or t
  misc_feature (1079)..(1079): n is a, c, g, or t
  misc_feature (1082)..(1082): n is a, c, g, or t
  misc_feature (1090)..(1090): n is a, c, g, or t
  misc_feature (1096)..(1096): n is a, c, g, or t
  misc_feature (1110)..(1110): n is a, c, g, or t
  misc_feature (1116)..(1116): n is a, c, g, or t
  misc_feature (1121)..(1121): n is a, c, g, or t
  misc_feature (1126)..(1126): n is a, c, g, or t
  misc_feature (1141)..(1141): n is a, c, g, or t
  misc_feature (1149)..(1150): n is a, c, g, or t
  misc_feature (1155)..(1155): n is a, c, g, or t
  misc_feature (1160)..(1160): n is a, c, g, or t
  misc_feature (1162)..(1162): n is a, c, g, or t
  misc_feature (1166)..(1166): n is a, c, g, or t
  misc_feature (1169)..(1169): n is a, c, g, or t
  misc_feature (1177)..(1177): n is a, c, g, or t
  misc_feature (1179)..(1179): n is a, c, g, or t
  misc_feature (1181)..(1182): n is a, c, g, or t
  misc_feature (1185)..(1185): n is a, c, g, or t
  misc_feature (1188)..(1188): n is a, c, g, or t
  misc_feature (1191)..(1191): n is a, c, g, or t
  misc_feature (1195)..(1195): n is a, c, g, or t
  misc_feature (1197)..(1198): n is a, c, g, or t
  misc_feature (1202)..(1202): n is a, c, g, or t
  misc_feature (1226)..(1226): n is a, c, g, or t
  misc_feature (1228)..(1228): n is a, c, g, or t
  misc_feature (1240)..(1240): n is a, c, g, or t
  misc_feature (1262)..(1262): n is a, c, g, or t
  misc_feature (1267)..(1267): n is a, c, g, or t
  misc_feature (1292)..(1292): n is a, c, g, or t
tagagaaattactatgagaggatcgcatcaccatcaccatcacggatcctatttaggtgacactatagaatcgtcgacccacgcgtccggaggtgcaccatccatcacatctgtcacaccaagaggactgtgcagagatgaggaagacacctcttttgaatcactttctaaattcaatgtcaagtttccacctatggacaatgactcaactttcttacatagcactccagagagacccggcatccttagtcctgccacgtctgaggcagtgtgccaagagaaatttaatatggagttcagagacaacccagggaactttgttaaaacagaagaaactttatttgaaattcagggaattgaccccatagcttcagctatacaaaaccttaaaacaactgacaaaacaaagccctcaaatctcgtaaacacttgtatcaggacaactctggatagagctgcgtgtttgccacctggagaccataatgcattatatgtaaatagcttcccacttctggacccatctgatgcaccttttccctcactcgattccccgggaaaagcaatccgaggaccacagcagcccatttggaagccctttcctaatcaagacagtgactcggtggtactaagtggcacagactcagaactgcatatacctcgagtatgtgaattctgtcaagcagttttcccaccatccattacatccaggggggatttccttcggcatcttaattcacacttcaatggagagacttaagacacatttgaaaacagacatatcaagttctatgtgatgattttgggtttttaatactataaatacttgattgtaaactaaattcaagatcatttataggaaaatctagtttcacagctatttgaatttttttctggatttactatataactcttattttttaaaagatcattctgttcttncnaggagaataagcctaaaagaagaaaacaaaaaaatnctgtanaaactgnanccntggnatcaggttacngggctatnactaaatncnaattagnangggactaagtaananccaattttgttattcaaaatcaanttntgntggattcnagggancggtgaatgggggncaagtncaggnttttnttttttttgaaattntttttggnnagggnattcntngaanccnaaaaaaancnannaanccntgnaaanannaaantttgcgggaaacggggaattaacntnatttaaaaaggntttttgggggccgggaaaaatnggggnaaaaaaaaaaaaaaaaaaaaaggcn

SEQ ID NO: 91 - DNA, 1357 bp, Homo Sapiens
  misc_feature (867)..(867): n is a, c, g, or t
  misc_feature (911)..(911): n is a, c, g, or t
  misc_feature (913)..(913): n is a, c, g, or t
  misc_feature (925)..(925): n is a, c, g, or t
  misc_feature (936)..(936): n is a, c, g, or t
  misc_feature (960)..(960): n is a, c, g, or t
  misc_feature (969)..(969): n is a, c, g, or t
  misc_feature (978)..(978): n is a, c, g, or t
  misc_feature (983)..(984): n is a, c, g, or t
  misc_feature (994)..(994): n is a, c, g, or t
  misc_feature (1001)..(1001): n is a, c, g, or t
  misc_feature (1004)..(1005): n is a, c, g, or t
  misc_feature (1010)..(1010): n is a, c, g, or t
  misc_feature (1015)..(1015): n is a, c, g, or t
  misc_feature (1035)..(1035): n is a, c, g, or t
  misc_feature (1046)..(1046): n is a, c, g, or t
  misc_feature (1053)..(1053): n is a, c, g, or t
  misc_feature (1062)..(1062): n is a, c, g, or t
  misc_feature (1066)..(1066): n is a, c, g, or t
  misc_feature (1083)..(1083): n is a, c, g, or t
  misc_feature (1091)..(1091): n is a, c, g, or t
  misc_feature (1093)..(1093): n is a, c, g, or t
  misc_feature (1113)..(1113): n is a, c, g, or t
  misc_feature (1116)..(1116): n is a, c, g, or t
  misc_feature (1118)..(1118): n is a, c, g, or t
  misc_feature (1124)..(1124): n is a, c, g, or t
  misc_feature (1138)..(1138): n is a, c, g, or t
  misc_feature (1145)..(1145): n is a, c, g, or t
  misc_feature (1148)..(1148): n is a, c, g, or t
  misc_feature (1150)..(1150): n is a, c, g, or t
  misc_feature (1153)..(1153): n is a, c, g, or t
  misc_feature (1162)..(1162): n is a, c, g, or t
  misc_feature (1164)..(1164): n is a, c, g, or t
  misc_feature (1173)..(1174): n is a, c, g, or t
  misc_feature (1192)..(1192): n is a, c, g, or t
  misc_feature (1196)..(1196): n is a, c, g, or t
  misc_feature (1198)..(1198): n is a, c, g, or t
  misc_feature (1207)..(1207): n is a, c, g, or t
  misc_feature (1209)..(1209): n is a, c, g, or t
  misc_feature (1222)..(1222): n is a, c, g, or t
  misc_feature (1232)..(1232): n is a, c, g, or t
  misc_feature (1245)..(1245): n is a, c, g, or t
  misc_feature (1258)..(1258): n is a, c, g, or t
  misc_feature (1261)..(1262): n is a, c, g, or t
  misc_feature (1265)..(1265): n is a, c, g, or t
  misc_feature (1276)..(1276): n is a, c, g, or t
  misc_feature (1282)..(1285): n is a, c, g, or t
  misc_feature (1292)..(1293): n is a, c, g, or t
  misc_feature (1299)..(1299): n is a, c, g, or t
  misc_feature (1314)..(1314): n is a, c, g, or t
  misc_feature (1316)..(1316): n is a, c, g, or t
  misc_feature (1318)..(1321): n is a, c, g, or t
  misc_feature (1324)..(1325): n is a, c, g, or t
  misc_feature (1330)..(1330): n is a, c, g, or t
  misc_feature (1339)..(1340): n is a, c, g, or t
  misc_feature (1343)..(1343): n is a, c, g, or t
  misc_feature (1347)..(1347): n is a, c, g, or t
tagagaaattactatgagaggatcgcatcaccatcaccatcacggatcctatttaggtgacactatagaatcgtcgacccacgcgtccggcacaataagagctcgctgcagtctcgaactcctggtctcaagtgatcctcctgcctcagcctcccaagtagctgagactacaggagcgtgccatcacacctgtgtaattgacttattttttgtagagggtctcactttgttgcccaggctgatctcaaactcctgacctcaagtgattctcccacctcagcctcccaaagtgccgggatgacaagtgtggctgagttggtatgggctctcctttccccatatccaaggcaagcttccaggattcttctgggacatcaggtgttagggaccatcttagtccctacctcagtttcacacatgagaaaattgaagtccacagaggaggtgtggcttcatcaaaaacccactgagaacgagtgttagaatcaggctaggacacattggactcctcctccagggctctctgacatccaaggccctttgaaatctctctccagctgcaaacagatttctagacttctgatggaggtgatctgagatgagcagcctctaaaagcagcctctgcgagcctctaagagtagccgggacctgctggagaacagaacatggcctaggagcgcaacagccaagtgttcagcaccacggacagcttcgctggcctattgctggggaggccagaggtggggaggctggttgtccagcaagacagagtgccatgggagagagaaaaaaacatgggaaagatctcagagaccatctagtccagcctcctcgatttggatgggaggagacccaggacaagaganaagtgacttgtccaaggtcacacaacaagtcagtaaaaagccananatgggagctganagcctacttcntcacacctcttcaaggcctcaaanacctggggnccatgactnattannggcacagccnaaacctngannaaggnctccnaaattaaaattacctgtccntggaaatggcnagaaaanaaaaagggnaaantccaaaaaattggaaanaacccccngnccctgaaaggaaaagtctgngantnggcccntaatgcaaggtttnaaagaanctncntanttccagggnanggggccttnnaaaaaaatttatttaccngggnanccctttccngntttccccccgggnaattccgggnatttttccccccnaaaaaggcccccnttnnccnaagggcccaancctggnnnnaaaaacnnccgccncccccaagggggggnanannnnaannccccngccccaaannttnaaanggggggttaa

SEQ ID NO: 92 - DNA, 2127 bp, Homo Sapiens
  misc_feature (2)..(3): n is a, c, g, or t
  misc_feature (15)..(15): n is a, c, g, or t
  misc_feature (17)..(17): n is a, c, g, or t
  misc_feature (21)..(21): n is a, c, g, or t
  misc_feature (26)..(26): n is a, c, g, or t
  misc_feature (34)..(34): n is a, c, g, or t
  misc_feature (44)..(46): n is a, c, g, or t
  misc_feature (52)..(52): n is a, c, g, or t
  misc_feature (59)..(59): n is a, c, g, or t
  misc_feature (61)..(61): n is a, c, g, or t
  misc_feature (63)..(63): n is a, c, g, or t
  misc_feature (72)..(73): n is a, c, g, or t
  misc_feature (79)..(80): n is a, c, g, or t
  misc_feature (99)..(99): n is a, c, g, or t
  misc_feature (104)..(104): n is a, c, g, or t
  misc_feature (113)..(113): n is a, c, g, or t
  misc_feature (116)..(116): n is a, c, g, or t
  misc_feature (118)..(118): n is a, c, g, or t
  misc_feature (127)..(127): n is a, c, g, or t
  misc_feature (133)..(133): n is a, c, g, or t
  misc_feature (135)..(135): n is a, c, g, or t
  misc_feature (138)..(139): n is a, c, g, or t
  misc_feature (143)..(143): n is a, c, g, or t
  misc_feature (149)..(149): n is a, c, g, or t
  misc_feature (158)..(158): n is a, c, g, or t
  misc_feature (162)..(162): n is a, c, g, or t
  misc_feature (164)..(165): n is a, c, g, or t
  misc_feature (183)..(184): n is a, c, g, or t
  misc_feature (190)..(190): n is a, c, g, or t
  misc_feature (192)..(192): n is a, c, g, or t
  misc_feature (194)..(194): n is a, c, g, or t
  misc_feature (198)..(199): n is a, c, g, or t
  misc_feature (201)..(202): n is a, c, g, or t
  misc_feature (204)..(204): n is a, c, g, or t
  misc_feature (210)..(210): n is a, c, g, or t
  misc_feature (212)..(212): n is a, c, g, or t
  misc_feature (221)..(223): n is a, c, g, or t
  misc_feature (228)..(229): n is a, c, g, or t
  misc_feature (233)..(233): n is a, c, g, or t
  misc_feature (237)..(237): n is a, c, g, or t
  misc_feature (240)..(241): n is a, c, g, or t
  misc_feature (247)..(247): n is a, c, g, or t
  misc_feature (266)..(266): n is a, c, g, or t
  misc_feature (269)..(269): n is a, c, g, or t
  misc_feature (280)..(280): n is a, c, g, or t
  misc_feature (283)..(284): n is a, c, g, or t
  misc_feature (297)..(297): n is a, c, g, or t
  misc_feature (299)..(299): n is a, c, g, or t
  misc_feature (301)..(304): n is a, c, g, or t
  misc_feature (308)..(309): n is a, c, g, or t
  misc_feature (311)..(313): n is a, c, g, or t
  misc_feature (318)..(318): n is a, c, g, or t
  misc_feature (323)..(323): n is a, c, g, or t
  misc_feature (332)..(332): n is a, c, g, or t
  misc_feature (337)..(337): n is a, c, g, or t
  misc_feature (340)..(340): n is a, c, g, or t
  misc_feature (342)..(342): n is a, c, g, or t
  misc_feature (349)..(350): n is a, c, g, or t
  misc_feature (353)..(354): n is a, c, g, or t
  misc_feature (356)..(357): n is a, c, g, or t
  misc_feature (362)..(362): n is a, c, g, or t
  misc_feature (364)..(364): n is a, c, g, or t
  misc_feature (367)..(367): n is a, c, g, or t
  misc_feature (371)..(371): n is a, c, g, or t
  misc_feature (373)..(373): n is a, c, g, or t
  misc_feature (375)..(376): n is a, c, g, or t
  misc_feature (378)..(379): n is a, c, g, or t
  misc_feature (383)..(386): n is a, c, g, or t
  misc_feature (389)..(389): n is a, c, g, or t
  misc_feature (391)..(393): n is a, c, g, or t
  misc_feature (397)..(397): n is a, c, g, or t
  misc_feature (402)..(402): n is a, c, g, or t
  misc_feature (404)..(404): n is a, c, g, or t
  misc_feature (406)..(406): n is a, c, g, or t
  misc_feature (408)..(408): n is a, c, g, or t
  misc_feature (412)..(412): n is a, c, g, or t
  misc_feature (415)..(415): n is a, c, g, or t
  misc_feature (418)..(418): n is a, c, g, or t
  misc_feature (422)..(422): n is a, c, g, or t
  misc_feature (427)..(427): n is a, c, g, or t
  misc_feature (429)..(430): n is a, c, g, or t
  misc_feature (434)..(434): n is a, c, g, or t
  misc_feature (437)..(437): n is a, c, g, or t
  misc_feature (439)..(441): n is a, c, g, or t
  misc_feature (443)..(443): n is a, c, g, or t
  misc_feature (445)..(446): n is a, c, g, or t
  misc_feature (448)..(449): n is a, c, g, or t
  misc_feature (451)..(451): n is a, c, g, or t
  misc_feature (453)..(453): n is a, c, g, or t
  misc_feature (456)..(456): n is a, c, g, or t
  misc_feature (458)..(458): n is a, c, g, or t
  misc_feature (460)..(460): n is a, c, g, or t
  misc_feature (464)..(464): n is a, c, g, or t
  misc_feature (467)..(468): n is a, c, g, or t
  misc_feature (470)..(470): n is a, c, g, or t
  misc_feature (482)..(483): n is a, c, g, or t
  misc_feature (485)..(485): n is a, c, g, or t
  misc_feature (487)..(489): n is a, c, g, or t
  misc_feature (491)..(491): n is a, c, g, or t
  misc_feature (494)..(496): n is a, c, g, or t
  misc_feature (501)..(501): n is a, c, g, or t
  misc_feature (505)..(506): n is a, c, g, or t
  misc_feature (513)..(513): n is a, c, g, or t
  misc_feature (518)..(519): n is a, c, g, or t
  misc_feature (522)..(522): n is a, c, g, or t
  misc_feature (524)..(524): n is a, c, g, or t
  misc_feature (527)..(527): n is a, c, g, or t
  misc_feature (531)..(533): n is a, c, g, or t
  misc_feature (537)..(537): n is a, c, g, or t
  misc_feature (540)..(544): n is a, c, g, or t
  misc_feature (547)..(548): n is a, c, g, or t
  misc_feature (552)..(553): n is a, c, g, or t
  misc_feature (555)..(557): n is a, c, g, or t
  misc_feature (559)..(560): n is a, c, g, or t
  misc_feature (564)..(564): n is a, c, g, or t
  misc_feature (566)..(566): n is a, c, g, or t
  misc_feature (569)..(571): n is a, c, g, or t
  misc_feature (573)..(573): n is a, c, g, or t
  misc_feature (579)..(579): n is a, c, g, or t
  misc_feature (583)..(584): n is a, c, g, or t
  misc_feature (592)..(592): n is a, c, g, or t
  misc_feature (597)..(597): n is a, c, g, or t
  misc_feature (600)..(600): n is a, c, g, or t
  misc_feature (602)..(602): n is a, c, g, or t
  misc_feature (604)..(604): n is a, c, g, or t
  misc_feature (606)..(607): n is a, c, g, or t
  misc_feature (610)..(612): n is a, c, g, or t
  misc_feature (615)..(615): n is a, c, g, or t
  misc_feature (617)..(618): n is a, c, g, or t
  misc_feature (620)..(620): n is a, c, g, or t
  misc_feature (624)..(624): n is a, c, g, or t
  misc_feature (628)..(628): n is a, c, g, or t
  misc_feature (634)..(635): n is a, c, g, or t
  misc_feature (637)..(637): n is a, c, g, or t
  misc_feature (645)..(645): n is a, c, g, or t
  misc_feature (647)..(647): n is a, c, g, or t
  misc_feature (650)..(651): n is a, c, g, or t
  misc_feature (653)..(654): n is a, c, g, or t
  misc_feature (663)..(663): n is a, c, g, or t
  misc_feature (668)..(668): n is a, c, g, or t
  misc_feature (670)..(670): n is a, c, g, or t
  misc_feature (673)..(673): n is a, c, g, or t
  misc_feature (676)..(676): n is a, c, g, or t
  misc_feature (678)..(678): n is a, c, g, or t
  misc_feature (685)..(685): n is a, c, g, or t
  misc_feature (689)..(690): n is a, c, g, or t
  misc_feature (693)..(694): n is a, c, g, or t
  misc_feature (702)..(702): n is a, c, g, or t
  misc_feature (705)..(705): n is a, c, g, or t
  misc_feature (708)..(708): n is a, c, g, or t
  misc_feature (710)..(711): n is a, c, g, or t
  misc_feature (716)..(716): n is a, c, g, or t
  misc_feature (718)..(718): n is a, c, g, or t
  misc_feature (723)..(723): n is a, c, g, or t
  misc_feature (730)..(730): n is a, c, g, or t
  misc_feature (732)..(733): n is a, c, g, or t
  misc_feature (736)..(736): n is a, c, g, or t
  misc_feature (739)..(741): n is a, c, g, or t
  misc_feature (743)..(744): n is a, c, g, or t
  misc_feature (755)..(755): n is a, c, g, or t
  misc_feature (757)..(758): n is a, c, g, or t
  misc_feature (765)..(765): n is a, c, g, or t
  misc_feature (767)..(768): n is a, c, g, or t
  misc_feature (770)..(772): n is a, c, g, or t
  misc_feature (774)..(774): n is a, c, g, or t
  misc_feature (779)..(780): n is a, c, g, or t
  misc_feature (783)..(783): n is a, c, g, or t
  misc_feature (786)..(788): n is a, c, g, or t
  misc_feature (794)..(794): n is a, c, g, or t
  misc_feature (798)..(798): n is a, c, g, or t
  misc_feature (800)..(800): n is a, c, g, or t
  misc_feature (813)..(813): n is a, c, g, or t
  misc_feature (815)..(815): n is a, c, g, or t
  misc_feature (818)..(818): n is a, c, g, or t
  misc_feature (821)..(821): n is a, c, g, or t
  misc_feature (823)..(823): n is a, c, g, or t
  misc_feature (826)..(828): n is a, c, g, or t
  misc_feature (830)..(831): n is a, c, g, or t
  misc_feature (833)..(833): n is a, c, g, or t
  misc_feature (836)..(837): n is a, c, g, or t
  misc_feature (840)..(840): n is a, c, g, or t
  misc_feature (843)..(844): n is a, c, g, or t
  misc_feature (846)..(847): n is a, c, g, or t
  misc_feature (855)..(857): n is a, c, g, or t
  misc_feature (859)..(859): n is a, c, g, or t
  misc_feature (861)..(861): n is a, c, g, or t
  misc_feature (865)..(867): n is a, c, g, or t
  misc_feature (869)..(871): n is a, c, g, or t
  misc_feature (873)..(878): n is a, c, g, or t
  misc_feature (881)..(882): n is a, c, g, or t
  misc_feature (885)..(885): n is a, c, g, or t
  misc_feature (887)..(887): n is a, c, g, or t
  misc_feature (890)..(891): n is a, c, g, or t
  misc_feature (895)..(895): n is a, c, g, or t
  misc_feature (902)..(902): n is a, c, g, or t
  misc_feature (906)..(906): n is a, c, g, or t
  misc_feature (908)..(909): n is a, c, g, or t
  misc_feature (911)..(913): n is a, c, g, or t
  misc_feature (915)..(915): n is a, c, g, or t
  misc_feature (917)..(917): n is a, c, g, or t
  misc_feature (920)..(920): n is a, c, g, or t
  misc_feature (927)..(927): n is a, c, g, or t
  misc_feature (929)..(930): n is a, c, g, or t
  misc_feature (934)..(934): n is a, c, g, or t
  misc_feature (936)..(936): n is a, c, g, or t
  misc_feature (938)..(939): n is a, c, g, or t
  misc_feature (944)..(944): n is a, c, g, or t
  misc_feature (948)..(948): n is a, c, g, or t
  misc_feature (955)..(955): n is a, c, g, or t
  misc_feature (958)..(958): n is a, c, g, or t
  misc_feature (962)..(963): n is a, c, g, or t
  misc_feature (969)..(970): n is a, c, g, or t
  misc_feature (972)..(972): n is a, c, g, or t
  misc_feature (974)..(974): n is a, c, g, or t
  misc_feature (977)..(977): n is a, c, g, or t
  misc_feature (982)..(982): n is a, c, g, or t
  misc_feature (987)..(987): n is a, c, g, or t
  misc_feature (994)..(994): n is a, c, g, or t
  misc_feature (996)..(996): n is a, c, g, or t
  misc_feature (999)..(999): n is a, c, g, or t
  misc_feature (1002)..(1003): n is a, c, g, or t
  misc_feature (1009)..(1010): n is a, c, g, or t
  misc_feature (1014)..(1015): n is a, c, g, or t
  misc_feature (1020)..(1020): n is a, c, g, or t
  misc_feature (1023)..(1023): n is a, c, g, or t
  misc_feature (1025)..(1029): n is a, c, g, or t
  misc_feature (1031)..(1031): n is a, c, g, or t
  misc_feature (1033)..(1036): n is a, c, g, or t
  misc_feature (1042)..(1043): n is a, c, g, or t
  misc_feature (1046)..(1046): n is a, c, g, or t
  misc_feature (1048)..(1049): n is a, c, g, or t
  misc_feature (1053)..(1053): n is a, c, g, or t
  misc_feature (1055)..(1055): n is a, c, g, or t
  misc_feature (1058)..(1060): n is a, c, g, or t
  misc_feature (1065)..(1065): n is a, c, g, or t
  misc_feature (1068)..(1068): n is a, c, g, or t
  misc_feature (1070)..(1070): n is a, c, g, or t
  misc_feature (1075)..(1076): n is a, c, g, or t
  misc_feature (1078)..(1079): n is a, c, g, or t
  misc_feature (1084)..(1084): n is a, c, g, or t
  misc_feature (1089)..(1090): n is a, c, g, or t
  misc_feature (1093)..(1095): n is a, c, g, or t
  misc_feature (1100)..(1100): n is a, c, g, or t
  misc_feature (1105)..(1105): n is a, c, g, or t
  misc_feature (1107)..(1107): n is a, c, g, or t
  misc_feature (1109)..(1109): n is a, c, g, or t
  misc_feature (1111)..(1113): n is a, c, g, or t
  misc_feature (1118)..(1119): n is a, c, g, or t
  misc_feature (1121)..(1121): n is a, c, g, or t
  misc_feature (1126)..(1126): n is a, c, g, or t
  misc_feature (1129)..(1131): n is a, c, g, or t
  misc_feature (1134)..(1136): n is a, c, g, or t
  misc_feature (1139)..(1139): n is a, c, g, or t
  misc_feature (1142)..(1142): n is a, c, g, or t
  misc_feature (1145)..(1145): n is a, c, g, or t
  misc_feature (1152)..(1152): n is a, c, g, or t
  misc_feature (1154)..(1154): n is a, c, g, or t
  misc_feature (1156)..(1156): n is a, c, g, or t
  misc_feature (1164)..(1165): n is a, c, g, or t
  misc_feature (1168)..(1168): n is a, c, g, or t
  misc_feature (1175)..(1175): n is a, c, g, or t
  misc_feature (1180)..(1181): n is a, c, g, or t
  misc_feature (1186)..(1186): n is a, c, g, or t
  misc_feature (1191)..(1191): n is a, c, g, or t
  misc_feature (1193)..(1193): n is a, c, g, or t
  misc_feature (1198)..(1199): n is a, c, g, or t
  misc_feature (1206)..(1208): n is a, c, g, or t
  misc_feature (1212)..(1212): n is a, c, g, or t
  misc_feature (1214)..(1214): n is a, c, g, or t
  misc_feature (1216)..(1216): n is a, c, g, or t
  misc_feature (1220)..(1222): n is a, c, g, or t
  misc_feature (1228)..(1228): n is a, c, g, or t
  misc_feature (1230)..(1230): n is a, c, g, or t
  misc_feature (1232)..(1235): n is a, c, g, or t
  misc_feature (1239)..(1240): n is a, c, g, or t
  misc_feature (1243)..(1243): n is a, c, g, or t
  misc_feature (1246)..(1247): n is a, c, g, or t
  misc_feature (1249)..(1250): n is a, c, g, or t
  misc_feature (1253)..(1255): n is a, c, g, or t
  misc_feature (1259)..(1260): n is a, c, g, or t
  misc_feature (1264)..(1264): n is a, c, g, or t
  misc_feature (1267)..(1267): n is a, c, g, or t
  misc_feature (1270)..(1270): n is a, c, g, or t
  misc_feature (1277)..(1277): n is a, c, g, or t
  misc_feature (1280)..(1281): n is a, c, g, or t
  misc_feature (1287)..(1290): n is a, c, g, or t
  misc_feature (1292)..(1292): n is a, c, g, or t
  misc_feature (1294)..(1294): n is a, c, g, or t
  misc_feature (1300)..(1300): n is a, c, g, or t
  misc_feature (1302)..(1302): n is a, c, g, or t
  misc_feature (1305)..(1306): n is a, c, g, or t
  misc_feature (1311)..(1311): n is a, c, g, or t
  misc_feature (1318)..(1318): n is a, c, g, or t
  misc_feature (1328)..(1328): n is a, c, g, or t
  misc_feature (1330)..(1331): n is a, c, g, or t
  misc_feature (1336)..(1336): n is a, c, g, or t
  misc_feature (1339)..(1339): n is a, c, g, or t
  misc_feature (1341)..(1341): n is a, c, g, or t
  misc_feature (1345)..(1345): n is a, c, g, or t
  misc_feature (1349)..(1349): n is a, c, g, or t
  misc_feature (1351)..(1351): n is a, c, g, or t
  misc_feature (1354)..(1355): n is a, c, g, or t
  misc_feature (1358)..(1358): n is a, c, g, or t
  misc_feature (1361)..(1362): n is a, c, g, or t
  misc_feature (1365)..(1365): n is a, c, g, or t
  misc_feature (1368)..(1368): n is a, c, g, or t
  misc_feature (1370)..(1370): n is a, c, g, or t
  misc_feature (1372)..(1372): n is a, c, g, or t
  misc_feature (1375)..(1375): n is a, c, g, or t
  misc_feature (1380)..(1383): n is a, c, g, or t
  misc_feature (1385)..(1385): n is a, c, g, or t
  misc_feature (1387)..(1388): n is a, c, g, or t
  misc_feature (1391)..(1391): n is a, c, g, or t
  misc_feature (1397)..(1397): n is a, c, g, or t
  misc_feature (1400)..(1400): n is a, c, g, or t
  misc_feature (1409)..(1409): n is a, c, g, or t
  misc_feature (1412)..(1412): n is a, c, g, or t
  misc_feature (1417)..(1418): n is a, c, g, or t
  misc_feature (1422)..(1423): n is a, c, g, or t
  misc_feature (1428)..(1428): n is a, c, g, or t
  misc_feature (1432)..(1432): n is a, c, g, or t
  misc_feature (1435)..(1436): n is a, c, g, or t
  misc_feature (1439)..(1439): n is a, c, g, or t
  misc_feature (1444)..(1445): n is a, c, g, or t
  misc_feature (1450)..(1450): n is a, c, g, or t
  misc_feature (1453)..(1453): n is a, c, g, or t
  misc_feature (1457)..(1457): n is a, c, g, or t
  misc_feature (1463)..(1465): n is a, c, g, or t
  misc_feature (1473)..(1473): n is a, c, g, or t
  misc_feature (1477)..(1477): n is a, c, g, or t
  misc_feature (1479)..(1479): n is a, c, g, or t
  misc_feature (1481)..(1482): n is a, c, g, or t
  misc_feature (1484)..(1485): n is a, c, g, or t
  misc_feature (1488)..(1488): n is a, c, g, or t
  misc_feature (1490)..(1491): n is a, c, g, or t
  misc_feature (1514)..(1515): n is a, c, g, or t
  misc_feature (1522)..(1523): n is a, c, g, or t
  misc_feature (1533)..(1535): n is a, c, g, or t
  misc_feature (1544)..(1544): n is a, c, g, or t
  misc_feature (1546)..(1546): n is a, c, g, or t
  misc_feature (1552)..(1555): n is a, c, g, or t
  misc_feature (1557)..(1557): n is a, c, g, or t
  misc_feature (1559)..(1560): n is a, c, g, or t
  misc_feature (1569)..(1570): n is a, c, g, or t
  misc_feature (1573)..(1573): n is a, c, g, or t
  misc_feature (1575)..(1575): n is a, c, g, or t
  misc_feature (1578)..(1580): n is a, c, g, or t
  misc_feature (1582)..(1583): n is a, c, g, or t
  misc_feature (1593)..(1597): n is a, c, g, or t
  misc_feature (1603)..(1604): n is a, c, g, or t
  misc_feature (1606)..(1606): n is a, c, g, or t
  misc_feature (1609)..(1610): n is a, c, g, or t
  misc_feature (1612)..(1612): n is a, c, g, or t
  misc_feature (1616)..(1616): n is a, c, g, or t
  misc_feature (1618)..(1618): n is a, c, g, or t
  misc_feature (1625)..(1625): n is a, c, g, or t
  misc_feature (1633)..(1634): n is a, c, g, or t
  misc_feature (1637)..(1637): n is a, c, g, or t
  misc_feature (1639)..(1639): n is a, c, g, or t
  misc_feature (1650)..(1650): n is a, c, g, or t
  misc_feature (1654)..(1654): n is a, c, g, or t
  misc_feature (1659)..(1659): n is a, c, g, or t
  misc_feature (1663)..(1663): n is a, c, g, or t
  misc_feature (1667)..(1667): n is a, c, g, or t
  misc_feature (1674)..(1678): n is a, c, g, or t
  misc_feature (1681)..(1681): n is a, c, g, or t
  misc_feature (1690)..(1690): n is a, c, g, or t
  misc_feature (1692)..(1692): n is a, c, g, or t
  misc_feature (1695)..(1695): n is a, c, g, or t
  misc_feature (1697)..(1700): n is a, c, g, or t
  misc_feature (1704)..(1706): n is a, c, g, or t
  misc_feature (1708)..(1709): n is a, c, g, or t
  misc_feature (1711)..(1711): n is a, c, g, or t
  misc_feature (1718)..(1718): n is a, c, g, or t
  misc_feature (1720)..(1721): n is a, c, g, or t
  misc_feature (1725)..(1725): n is a, c, g, or t
  misc_feature (1732)..(1732): n is a, c, g, or t
  misc_feature (1735)..(1735): n is a, c, g, or t
  misc_feature (1739)..(1739): n is a, c, g, or t
  misc_feature (1741)..(1741): n is a, c, g, or t
  misc_feature (1743)..(1744): n is a, c, g, or t
  misc_feature (1751)..(1751): n is a, c, g, or t
  misc_feature (1753)..(1754): n is a, c, g, or t
  misc_feature (1757)..(1757): n is a, c, g, or t
  misc_feature (1760)..(1760): n is a, c, g, or t
  misc_feature (1765)..(1765): n is a, c, g, or t
  misc_feature (1768)..(1768): n is a, c, g, or t
  misc_feature (1771)..(1771): n is a, c, g, or t
  misc_feature (1774)..(1774): n is a, c, g, or t
  misc_feature (1777)..(1778): n is a, c, g, or t
  misc_feature (1785)..(1786): n is a, c, g, or t
  misc_feature (1801)..(1801): n is a, c, g, or t
  misc_feature (1803)..(1804): n is a, c, g, or t
  misc_feature (1808)..(1811): n is a, c, g, or t
  misc_feature (1814)..(1814): n is a, c, g, or t
  misc_feature (1816)..(1816): n is a, c, g, or t
  misc_feature (1818)..(1818): n is a, c, g, or t
  misc_feature (1821)..(1821): n is a, c, g, or t
  misc_feature (1828)..(1828): n is a, c, g, or t
  misc_feature (1830)..(1830): n is a, c, g, or t
  misc_feature (1837)..(1837): n is a, c, g, or t
  misc_feature (1840)..(1840): n is a, c, g, or t
  misc_feature (1843)..(1843): n is a, c, g, or t
  misc_feature (1849)..(1851): n is a, c, g, or t
  misc_feature (1855)..(1855): n is a, c, g, or t
  misc_feature (1858)..(1861): n is a, c, g, or t
  misc_feature (1864)..(1864): n is a, c, g, or t
  misc_feature (1868)..(1869): n is a, c, g, or t
  misc_feature (1872)..(1873): n is a, c, g, or t
  misc_feature (1878)..(1878): n is a, c, g, or t
  misc_feature (1883)..(1883): n is a, c, g, or t
  misc_feature (1885)..(1885): n is a, c, g, or t
  misc_feature (1889)..(1889): n is a, c, g, or t
  misc_feature (1892)..(1892): n is a, c, g, or t
  misc_feature (1901)..(1901): n is a, c, g, or t
  misc_feature (1904)..(1904): n is a, c, g, or t
  misc_feature (1909)..(1909): n is a, c, g, or t
  misc_feature (1916)..(1916): n is a, c, g, or t
  misc_feature (1918)..(1921): n is a, c, g, or t
  misc_feature (1950)..(1950): n is a, c, g, or t
  misc_feature (1952)..(1952): n is a, c, g, or t
  misc_feature (1956)..(1956): n is a, c, g, or t
  misc_feature (1958)..(1958): n is a, c, g, or t
  misc_feature (1963)..(1963): n is a, c, g, or t
  misc_feature (1966)..(1967): n is a, c, g, or t
  misc_feature (1969)..(1969): n is a, c, g, or t
  misc_feature (1974)..(1974): n is a, c, g, or t
  misc_feature (1982)..(1982): n is a, c, g, or t
  misc_feature (1986)..(1989): n is a, c, g, or t
  misc_feature (1991)..(1991): n is a, c, g, or t
  misc_feature (1993)..(1994): n is a, c, g, or t
  misc_feature (1996)..(1997): n is a, c, g, or t
  misc_feature (1999)..(1999): n is a, c, g, or t
  misc_feature (2002)..(2002): n is a, c, g, or t
  misc_feature (2005)..(2005): n is a, c, g, or t
  misc_feature (2007)..(2007): n is a, c, g, or t
  misc_feature (2012)..(2013): n is a, c, g, or t
  misc_feature (2016)..(2016): n is a, c, g, or t
  misc_feature (2018)..(2018): n is a, c, g, or t
  misc_feature (2021)..(2022): n is a, c, g, or t
  misc_feature (2024)..(2024): n is a, c, g, or t
  misc_feature (2026)..(2027): n is a, c, g, or t
  misc_feature (2036)..(2037): n is a, c, g, or t
  misc_feature (2044)..(2044): n is a, c, g, or t
  misc_feature (2049)..(2050): n is a, c, g, or t
  misc_feature (2052)..(2052): n is a, c, g, or t
  misc_feature (2056)..(2057): n is a, c, g, or t
  misc_feature (2061)..(2062): n is a, c, g, or t
  misc_feature (2067)..(2067): n is a, c, g, or t
  misc_feature (2069)..(2069): n is a, c, g, or t
  misc_feature (2071)..(2071): n is a, c, g, or t
  misc_feature (2076)..(2076): n is a, c, g, or t
  misc_feature (2078)..(2079): n is a, c, g, or t
  misc_feature (2081)..(2081): n is a, c, g, or t
  misc_feature (2091)..(2092): n is a, c, g, or t
  misc_feature (2095)..(2095): n is a, c, g, or t
  misc_feature (2097)..(2099): n is a, c, g, or t
  misc_feature (2104)..(2104): n is a, c, g, or t
  misc_feature (2109)..(2110): n is a, c, g, or t
  misc_feature (2121)..(2122): n is a, c, g, or t
annacaaataaaaanangagnaaaanttatatangggggggggnnntggtcntcccccncntnccccccttnngggggnnttcttatttttgggggggnaccantattaaaanttngntcgaacccnacgtcntntcnncgtngttagnacaaggaanacgngnnaatcgtccaacaatgganntcccgncngncagnnanncncgcgcngntcgcagccnnntgtgnncctncgtnccnncagaancacgcacaggcgagcgtgngtnatccatgcttngcnnacaaaagcttctnanannnngtcnncnnngtctngcgtnacccgccangcctnttntnccatagnntcnnannacacncntgnttgnantnncnngaannnnaantnnngacncgganancntngagnatnatnaatncctangnngctngtnannncntnntnngntncanangnagangcnngnccatgttagcanncngnnngnatnnnactcntccnnatcttgntctcnngantngancacnnncccncgnnnnntcnnagcnntnnngnnagtntnacnnngnaaaccnctcnnaagtacgngtgcnatntngntnntcnnncgnanntngcanatcnatagtnncncaccagcntnatnngnngtttacagnctggnanatnctngncactganaccnncanntaatagtnccntcncnngcctntnttgantgtgatngnngcnctnnnannccccttgaaananngttcatncnnannntntacannccncannnatgaanagcncntctaggatctccngnccnctntnctnnntnntntanngantanntnncaataaannngnanaaannncnnncnnnnnnagnntcntntgnnactnatacttnaatncnngnnntncnctnaaatccncnngtcntngnnattanatantaggcantgntttnnttaganncntntgntatcnccatnactcccncnctnctnnatgttnnctanngccanagntnnnnnanannnncataannatncnncttncnaannnatttngtntnagatnncnngcacnaaatnngannnaaagnctatntnangnnngaagnntncattnaannntannnctngcnctntctaacntnanaacccctnncgncatcaanacatnnctacngaaantnacctnnatcccannnctcntntncggnnntctccntncnnnncttnncantanncnnccnnncttnnattnatntancccttangtnntacatnnnntnanctcccntncanntatanattatantctatcctananngtatnacncntctnagtncnttnntcnacnnccntcngncntgnacatnnnngntnnctnctactnaanctcatcacnttnaatgnntctnntactnatanagnnatncttcnntagtngcntacnttagannnaaccaacngctntntnncnnatngnntgtaacatgtacagtaccccctnnccttaannatcggaaccnnnccacatttncnactatnnnntnanngaacaaaannaangnttnnntnnccccatagannnnnagatgnntnatnntngtcngngctacantacgtatnnaancnagcttcatatnctangtatngatngatngataaannnnngtntcactgacntnaantnnnntctnnncnntntttcatncnntttnttcccanaanagtncncnntgacttngnnatntanatatnatnacnatncanntatactnngagggtacagtatantnngtannnnggntntntancacactncntccccanatnganagactnnnctcncannnnatngacnncanntcacntaatntnaganatntctacgttngangtatntgctgantnnnnagatcactatgtagccttctctctgtacnantacncncgctnttnncntactngtgccacnctcnnnncngnngnnanagntanantcacnnacntnacnntngnntactacagnnatacaanctatnngntatnntatnnctaantngnagtcntnntntgacatatanntcncnnnagtcnctatnncatatctatcnnctata

SEQ ID NO: 93 - DNA, 256 bp, Homo Sapiens
  misc_feature (94)..(94): n is a, c, g, or t
  misc_feature (132)..(132): n is a, c, g, or t
  misc_feature (141)..(141): n is a, c, g, or t
  misc_feature (145)..(145): n is a, c, g, or t
  misc_feature (148)..(148): n is a, c, g, or t
  misc_feature (160)..(160): n is a, c, g, or t
  misc_feature (168)..(168): n is a, c, g, or t
  misc_feature (183)..(183): n is a, c, g, or t
  misc_feature (193)..(193): n is a, c, g, or t
  misc_feature (197)..(197): n is a, c, g, or t
  misc_feature (212)..(212): n is a, c, g, or t
  misc_feature (214)..(214): n is a, c, g, or t
  misc_feature (227)..(227): n is a, c, g, or t
  misc_feature (232)..(232): n is a, c, g, or t
  misc_feature (237)..(237): n is a, c, g, or t
  misc_feature (241)..(241): n is a, c, g, or t
  misc_feature (252)..(252): n is a, c, g, or t
aaattagagaaattactatgagaggatcgcatcaccatcaccatcacggatcctatttaggtgacactatagaatcgtcgacccacgcgtccgngagaccaagcgatgagcatgcggaggtgctgggcctcncaaagacgnttcnganagctctcccganacccgagncggggaggaaaagcngcgactcctngctngcatccccgggagcngnactccagactggnccggnagtcngggngtcaggagcanatcc

SEQ ID NO: 94 - DNA, 1200 bp, Homo Sapiens
  misc_feature (1)..(1): n is a, c, g, or t
  misc_feature (754)..(754): n is a, c, g, or t
  misc_feature (757)..(757): n is a, c, g, or t
  misc_feature (784)..(784): n is a, c, g, or t
  misc_feature (789)..(789): n is a, c, g, or t
  misc_feature (792)..(792): n is a, c, g, or t
  misc_feature (795)..(795): n is a, c, g, or t
  misc_feature (797)..(797): n is a, c, g, or t
  misc_feature (834)..(834): n is a, c, g, or t
  misc_feature (836)..(836): n is a, c, g, or t
  misc_feature (842)..(842): n is a, c, g, or t
  misc_feature (852)..(852): n is a, c, g, or t
  misc_feature (864)..(864): n is a, c, g, or t
  misc_feature (866)..(866): n is a, c, g, or t
  misc_feature (872)..(873): n is a, c, g, or t
  misc_feature (880)..(881): n is a, c, g, or t
  misc_feature (886)..(886): n is a, c, g, or t
  misc_feature (893)..(893): n is a, c, g, or t
  misc_feature (897)..(897): n is a, c, g, or t
  misc_feature (899)..(899): n is a, c, g, or t
  misc_feature (903)..(903): n is a, c, g, or t
  misc_feature (915)..(915): n is a, c, g, or t
  misc_feature (917)..(917): n is a, c, g, or t
  misc_feature (921)..(922): n is a, c, g, or t
  misc_feature (936)..(936): n is a, c, g, or t
  misc_feature (941)..(941): n is a, c, g, or t
  misc_feature (945)..(946): n is a, c, g, or t
  misc_feature (953)..(953): n is a, c, g, or t
  misc_feature (962)..(963): n is a, c, g, or t
  misc_feature (968)..(968): n is a, c, g, or t
  misc_feature (974)..(975): n is a, c, g, or t
  misc_feature (980)..(980): n is a, c, g, or t
  misc_feature (986)..(986): n is a, c, g, or t
  misc_feature (994)..(994): n is a, c, g, or t
  misc_feature (996)..(996): n is a, c, g, or t
  misc_feature (1000)..(1000): n is a, c, g, or t
  misc_feature (1006)..(1007): n is a, c, g, or t
  misc_feature (1013)..(1013): n is a, c, g, or t
  misc_feature (1019)..(1020): n is a, c, g, or t
  misc_feature (1022)..(1024): n is a, c, g, or t
  misc_feature (1030)..(1030): n is a, c, g, or t
  misc_feature (1032)..(1032): n is a, c, g, or t
  misc_feature (1034)..(1034): n is a, c, g, or t
  misc_feature (1037)..(1038): n is a, c, g, or t
  misc_feature (1045)..(1045): n is a, c, g, or t
  misc_feature (1047)..(1047): n is a, c, g, or t
  misc_feature (1049)..(1049): n is a, c, g, or t
  misc_feature (1053)..(1053): n is a, c, g, or t
  misc_feature (1055)..(1055): n is a, c, g, or t
  misc_feature (1059)..(1059): n is a, c, g, or t
  misc_feature (1065)..(1065): n is a, c, g, or t
  misc_feature (1071)..(1071): n is a, c, g, or t
  misc_feature (1076)..(1076): n is a, c, g, or t
  misc_feature (1078)..(1078): n is a, c, g, or t
  misc_feature (1081)..(1081): n is a, c, g, or t
  misc_feature (1083)..(1083): n is a, c, g, or t
  misc_feature (1097)..(1097): n is a, c, g, or t
  misc_feature (1099)..(1099): n is a, c, g, or t
  misc_feature (1101)..(1101): n is a, c, g, or t
  misc_feature (1107)..(1107): n is a, c, g, or t
  misc_feature (1110)..(1112): n is a, c, g, or t
  misc_feature (1114)..(1114): n is a, c, g, or t
  misc_feature (1117)..(1117): n is a, c, g, or t
  misc_feature (1120)..(1120): n is a, c, g, or t
  misc_feature (1129)..(1129): n is a, c, g, or t
  misc_feature (1134)..(1137): n is a, c, g, or t
  misc_feature (1140)..(1140): n is a, c, g, or t
  misc_feature (1142)..(1142): n is a, c, g, or t
  misc_feature (1145)..(1145): n is a, c, g, or t
  misc_feature (1148)..(1148): n is a, c, g, or t
  misc_feature (1150)..(1150): n is a, c, g, or t
  misc_feature (1157)..(1157): n is a, c, g, or t
  misc_feature (1159)..(1159): n is a, c, g, or t
  misc_feature (1166)..(1166): n is a, c, g, or t
  misc_feature (1174)..(1175): n is a, c, g, or t
  misc_feature (1193)..(1195): n is a, c, g, or t
  misc_feature (1200)..(1200): n is a, c, g, or t
nttagagaaattactatgagaggatcgcatcaccatcaccatcacggtatcctatttaggtgacactatagaatcgtcgacccacgcgtccgcgagcgaggccggccgcgccatgcacctgatgaagaagcgggagaagcagcgcgagcagatggagcagatgaagcagcgcatcgcggaggagaacatcatgaaatccaacattgacaagaagttctctgcgcactacgacgcggtggaggcagagctcaagtccagcaccgtgggtctcgtgaccctgaatgacatgaaggccaagcaggaggctctggtgaaggagcgggagaagcagctggccaagaaggagcagtccaaggagctgcagatgaagctggagaagcttcgagagaaggagcgtaagaaggaagccaagcggaagatctccagcctgtccttcaccctggaggaggaagaagagggaggcgaggaggaagaggaggcggccatgtatgaggaggagatggaaagggaagagatcaccacgaagaagagaaaactggggaagaacccagacgttgacacaagcttcttgcctgatcgagaccgtgaggaggaggagaatcggcttcgggaagagctgcggcaggagtgggaagccaagcaggagaagatcaagagtgaggagatcgagatcaccttcagctactgggatggctctgggcaccggcggacagtcaagatgagaaagggcaacaccatgcagcagttcctgcanaangcgctcgagatccttcggaaagacttncattnagnctnangttcccaggggggtggagcagctccatgttcttccangnaagganttgatttttnccttcacccctncncaacanntttaccnnttttnttttttncctntnttanccggtacacaantnaaanngtcccccaccttancattncctnntctttcnttctttttnnttatnttcacnncaatnatctcntcatgccncnatancctccnnctttanaaatannannncttccncncnccnncatgtgntntnttcntncatnaacatnacactnaatcncnccntnttatttttctctcncncnctctanaannncnttnctntcttatganaatannnnatntnacntananactcttntnctctccntactagtnngttctgctgcccacctcnnnctctn

SEQ ID NO: 95 - DNA, 256 bp, Homo Sapiens
cgggagcggagagcggaccccagagagccctgagcagccccaccgccgccgccggcctagttaccatcacaccccgggaggagccgcagctgccgcagccggccccagtcaccatcaccgcaaccatgagcagcgaggccgagacccagcagccgcccgccgccccccccgccgcccccgccctcagcgccgccgacaccaagcccggcactacgggcagcggcgcagggagcggtggcccgggcggcctcacatc

SEQ ID NO: 96 - DNA, 256 bp, Homo Sapiens
  misc_feature (1)..(1): n is a, c, g, or t
  misc_feature (3)..(3): n is a, c, g, or t
nanctatgagaggatcgcatcaccatcaccatcacggatcctatttaggtgacactatagaatcgtcgacccacgcgtccgctgaactccagctggatgagggctggatggatgatgacaggaacgactttctggatgacctgcacatggacatgctggaggagcagcaccaccaggccatgcaattcacagctagcgtgctgcagcagaagaagcacgacgaagacggtgggaccacagatacagccaccatctt

SEQ ID NO: 97 - DNA, 1196 bp, Homo Sapiens
  misc_feature (899)..(899): n is a, c, g, or t
  misc_feature (901)..(904): n is a, c, g, or t
  misc_feature (907)..(912): n is a, c, g, or t
  misc_feature (914)..(917): n is a, c, g, or t
  misc_feature (919)..(958): n is a, c, g, or t
  misc_feature (967)..(967): n is a, c, g, or t
  misc_feature (969)..(969): n is a, c, g, or t
  misc_feature (973)..(973): n is a, c, g, or t
  misc_feature (978)..(978): n is a, c, g, or t
  misc_feature (989)..(989): n is a, c, g, or t
  misc_feature (993)..(993): n is a, c, g, or t
  misc_feature (999)..(999): n is a, c, g, or t
  misc_feature (1002)..(1002): n is a, c, g, or t
  misc_feature (1006)..(1006): n is a, c, g, or t
  misc_feature (1014)..(1014): n is a, c, g, or t
  misc_feature (1018)..(1019): n is a, c, g, or t
  misc_feature (1029)..(1029): n is a, c, g, or t
  misc_feature (1036)..(1036): n is a, c, g, or t
  misc_feature (1039)..(1039): n is a, c, g, or t
  misc_feature (1042)..(1042): n is a, c, g, or t
  misc_feature (1047)..(1049): n is a, c, g, or t
  misc_feature (1052)..(1052): n is a, c, g, or t
  misc_feature (1054)..(1054): n is a, c, g, or t
  misc_feature (1056)..(1057): n is a, c, g, or t
  misc_feature (1063)..(1063): n is a, c, g, or t
  misc_feature (1067)..(1068): n is a, c, g, or t
  misc_feature (1091)..(1091): n is a, c, g, or t
  misc_feature (1102)..(1102): n is a, c, g, or t
  misc_feature (1107)..(1107): n is a, c, g, or t
  misc_feature (1110)..(1110): n is a, c, g, or t
  misc_feature (1112)..(1112): n is a, c, g, or t
  misc_feature (1118)..(1118): n is a, c, g, or t
  misc_feature (1120)..(1120): n is a, c, g, or t
  misc_feature (1126)..(1126): n is a, c, g, or t
  misc_feature (1140)..(1140): n is a, c, g, or t
  misc_feature (1143)..(1143): n is a, c, g, or t
  misc_feature (1154)..(1154): n is a, c, g, or t
  misc_feature (1160)..(1162): n is a, c, g, or t
  misc_feature (1167)..(1168): n is a, c, g, or t
  misc_feature (1171)..(1171): n is a, c, g, or t
  misc_feature (1177)..(1177): n is a, c, g, or t
  misc_feature (1182)..(1182): n is a, c, g, or t
  misc_feature (1184)..(1184): n is a, c, g, or t
  misc_feature (1188)..(1188): n is a, c, g, or t
  misc_feature (1196)..(1196): n is a, c, g, or t
tagagaaattactatgagaggatcgcatcaccatcaccatcacggatcctatttaggtgacactatagaatcgtcgacccacgcgtccgtggcaggcagccggctggaaaccgtagggagcatcttctctcggactcgggacctggttcgggccggggtgctgaaggagaagcccctgtggtttgacgtatatgacgcctttcccccgctgagggagcccgtcttccaaaggcctcgagtgcgatatggcaaagccaaagctcccatccaagacatctggtaccacgaggatcggattagagcgaagttttattcagtgtatgggtctggtcaaagagcttttgatctattcaatccaaacttcaagtctacctgtcaacggtttgtggagaagtacactgagctacagaaacttggagaaacagatgaagagaagttatttgtggaaacagggaaggctttattggcagaaggtgtcattttaagacgagtaggcgaagcaaggactcaacacggaggtagtcacgtttcccggaaatccgaacacttgagtgtcagaccacagactgcgttggaagaaaacgagactcagaaagaagttccacaggaccagcatttggaggcacctgcagaccagtcgaaaggtctcttgcctccctgaaggacctgtatactgtgtatgctggcattcacactctactcactggctgaatgttgagctatttttaaacagttgaactgtgtaaatgtttcttgatctctaaggtattatgtttgccttctcttagttatttctgggttgtcacaaagctcagtatcatggtttgacagaagcagttatgtgaactttttatgttaggacattactaaataaagaattccctagctgcttataaaanannnnaannnnnnannnnannnnnnnnnnnnnnnnnnnnnnnnnnnnnnnnnnnnnnnnaaaaagggngncccnccctnagggggccgantaancttaantanctgnaactggancccnngtgaaaaaanccgaaanggnccncaaannnccncngnntttttnaaanncttggttgcccccggggtttttnttggggaaaancccanctntntggggnanttttcngggcttaggaaccnaanggaaaaaaatnccgggnnnacccnntgnaaattncccangncccnaaaaaatn

SEQ ID NO: 98 - DNA, 1410 bp, Homo Sapiens
  misc_feature (673)..(673): n is a, c, g, or t
  misc_feature (804)..(804): n is a, c, g, or t
  misc_feature (811)..(811): n is a, c, g, or t
  misc_feature (817)..(817): n is a, c, g, or t
  misc_feature (821)..(821): n is a, c, g, or t
  misc_feature (831)..(833): n is a, c, g, or t
  misc_feature (835)..(845): n is a, c, g, or t
  misc_feature (867)..(867): n is a, c, g, or t
  misc_feature (874)..(874): n is a, c, g, or t
  misc_feature (882)..(882): n is a, c, g, or t
  misc_feature (909)..(909): n is a, c, g, or t
  misc_feature (921)..(921): n is a, c, g, or t
  misc_feature (936)..(936): n is a, c, g, or t
  misc_feature (947)..(947): n is a, c, g, or t
  misc_feature (958)..(958): n is a, c, g, or t
  misc_feature (962)..(962): n is a, c, g, or t
  misc_feature (978)..(979): n is a, c, g, or t
  misc_feature (1000)..(1000): n is a, c, g, or t
  misc_feature (1003)..(1003): n is a, c, g, or t
  misc_feature (1014)..(1014): n is a, c, g, or t
  misc_feature (1018)..(1019): n is a, c, g, or t
  misc_feature (1035)..(1035): n is a, c, g, or t
  misc_feature (1044)..(1044): n is a, c, g, or t
  misc_feature (1069)..(1069): n is a, c, g, or t
  misc_feature (1082)..(1082): n is a, c, g, or t
  misc_feature (1085)..(1085): n is a, c, g, or t
  misc_feature (1098)..(1098): n is a, c, g, or t
  misc_feature (1100)..(1100): n is a, c, g, or t
  misc_feature (1106)..(1109): n is a, c, g, or t
  misc_feature (1126)..(1126): n is a, c, g, or t
  misc_feature (1133)..(1134): n is a, c, g, or t
  misc_feature (1136)..(1136): n is a, c, g, or t
  misc_feature (1139)..(1139): n is a, c, g, or t
  misc_feature (1150)..(1150): n is a, c, g, or t
  misc_feature (1156)..(1156): n is a, c, g, or t
  misc_feature (1178)..(1178): n is a, c, g, or t
  misc_feature (1192)..(1192): n is a, c, g, or t
  misc_feature (1204)..(1204): n is a, c, g, or t
  misc_feature (1206)..(1206): n is a, c, g, or t
  misc_feature (1215)..(1215): n is a, c, g, or t
  misc_feature (1219)..(1219): n is a, c, g, or t
  misc_feature (1223)..(1223): n is a, c, g, or t
  misc_feature (1225)..(1226): n is a, c, g, or t
  misc_feature (1232)..(1232): n is a, c, g, or t
  misc_feature (1234)..(1234): n is a, c, g, or t
  misc_feature (1240)..(1240): n is a, c, g, or t
  misc_feature (1246)..(1247): n is a, c, g, or t
  misc_feature (1259)..(1259): n is a, c, g, or t
  misc_feature (1281)..(1281): n is a, c, g, or t
  misc_feature (1293)..(1293): n is a, c, g, or t
  misc_feature (1298)..(1298): n is a, c, g, or t
  misc_feature (1309)..(1309): n is a, c, g, or t
  misc_feature (1325)..(1325): n is a, c, g, or t
  misc_feature (1328)..(1329): n is a, c, g, or t
  misc_feature (1333)..(1333): n is a, c, g, or t
  misc_feature (1344)..(1345): n is a, c, g, or t
  misc_feature (1347)..(1348): n is a, c, g, or t
  misc_feature (1356)..(1356): n is a, c, g, or t
  misc_feature (1358)..(1358): n is a, c, g, or t
  misc_feature (1362)..(1362): n is a, c, g, or t
  misc_feature (1366)..(1367): n is a, c, g, or t
  misc_feature (1370)..(1370): n is a, c, g, or t
  misc_feature (1381)..(1381): n is a, c, g, or t
  misc_feature (1385)..(1385): n is a, c, g, or t
  misc_feature (1409)..(1410): n is a, c, g, or t
agagaaattactatgagaggatcgcatcaccatcaccatcacggatcctatttaggtgacactatagaatcgtcgacccacgcgtccggagcagtgtccggccatggccggagcccgcaggctggagctaggcgaggccctggcgctggggtcgggctggcgtcatgcgtgccacgctctcctctacgcgccggaccctgggatgctcttcggccgcatcccgctgcgctacgccatactgatgcagatgcgcttcgatggacgcctgggcttccccggcggattcgtggacacgcaggacagaagcctagaggacgggctgaaccgcgagctgcgcgaggagctgggcgaagcggctgccgctttccgcgtggagcgcactgactaccgcagctcccacgtcgggtcagggccacgcgttgtggcccacttctatgccaagcgtctgacgctcgaggagctgttggctgtggaggccggcgcaacacgcgccaaggaccacgggctggaggtgctgggcctggtgcgagtgcccctgtataccctgcgggatggtgtaggaggcctgcctaccttcctggagaattcctttattggctctgcgcgggagcagttacttgaagctctccaggacttgggactgctgcagtctggctctatttcaggccttaanattccagctcatcactagaggcagccctccatggacccatgaaaactgagatgaggaccttggtactagggagggagggaaggacgtgggaatgttttcttattggatctgaaagatgatacatgataccngatgaanagaaanaaanaaaaaataannnannnnnnnnnnnggggcggccgcctccctataantgagtcntaattaanccttaattaacttgaacttggaactcntgtttgaaaaantccaagaaatgaacncaaaaactccnttctggatttntttnaaaaaccttccggttnnccccccgggcgtttttttttnggnaaaaatccaanttanntttggcaaaattttcnggaactaangaatttaaaattggaaaaaaaaatnccttggaataacnccnttttaaaattccnantggatnnnnaaaaaaatttttgaagnatttcanncnttnctcatgtaccnaaaacnaaaacttttcctgaaaataacncctttttaaaaccnaaaaaaaaaaancnaaatttttncggncttnannaaattntncccccnaaaaanncccccgaatttnaatgaaaaaaaaagggaattgnaaaaaaaaattnccctntaaaccttttnaaaaaaaaaaattttnctnngaanaaacaaaattnngnnttaaaatntncaangggnnttnaaaccctttcnaagnttaaaatttttccccccggaatann

SEQ ID NO: 99 - DNA, 256 bp, Homo Sapiens
  misc_feature (29)..(29): n is a, c, g, or t
  misc_feature (32)..(33): n is a, c, g, or t
  misc_feature (37)..(37): n is a, c, g, or t
  misc_feature (42)..(42): n is a, c, g, or t
  misc_feature (62)..(62): n is a, c, g, or t
  misc_feature (72)..(72): n is a, c, g, or t
taaaaattatttgctttgtgagcggatanatnntatngattnattgtgagcggatacatttncacagaattnttaaagaggagaaattaactatgagaggatcgcatcaccatcaccatcacggatcctatttaggtgacactatagaatcgtcgacccacgcgtccggaaaagctgggaaccttggtggaggggtggtgaccatcgaaaggagcaagagcaagatcaccgtgacatccgaggtgcctttctccaa

SEQ ID NO: 100 - DNA, 1400 bp, Homo Sapiens
  misc_feature (873)..(873): n is a, c, g, or t
  misc_feature (920)..(920): n is a, c, g, or t
  misc_feature (927)..(927): n is a, c, g, or t
  misc_feature (933)..(933): n is a, c, g, or t
  misc_feature (936)..(936): n is a, c, g, or t
  misc_feature (965)..(965): n is a, c, g, or t
  misc_feature (991)..(991): n is a, c, g, or t
  misc_feature (993)..(993): n is a, c, g, or t
  misc_feature (1001)..(1001): n is a, c, g, or t
  misc_feature (1004)..(1004): n is a, c, g, or t
  misc_feature (1012)..(1012): n is a, c, g, or t
  misc_feature (1027)..(1027): n is a, c, g, or t
  misc_feature (1042)..(1042): n is a, c, g, or t
  misc_feature (1044)..(1044): n is a, c, g, or t
  misc_feature (1053)..(1053): n is a, c, g, or t
  misc_feature (1055)..(1055): n is a, c, g, or t
  misc_feature (1059)..(1059): n is a, c, g, or t
  misc_feature (1068)..(1068): n is a, c, g, or t
  misc_feature (1077)..(1077): n is a, c, g, or t
  misc_feature (1092)..(1092): n is a, c, g, or t
  misc_feature (1111)..(1111): n is a, c, g, or t
  misc_feature (1116)..(1116): n is a, c, g, or t
  misc_feature (1122)..(1122): n is a, c, g, or t
  misc_feature (1128)..(1128): n is a, c, g, or t
  misc_feature (1130)..(1130): n is a, c, g, or t
  misc_feature (1132)..(1132): n is a, c, g, or t
  misc_feature (1139)..(1139): n is a, c, g, or t
  misc_feature (1143)..(1144): n is a, c, g, or t
  misc_feature (1149)..(1149): n is a, c, g, or t
  misc_feature (1163)..(1163): n is a, c, g, or t
  misc_feature (1206)..(1206): n is a, c, g, or t
  misc_feature (1211)..(1211): n is a, c, g, or t
  misc_feature (1214)..(1214): n is a, c, g, or t
  misc_feature (1220)..(1220): n is a, c, g, or t
  misc_feature (1223)..(1223): n is a, c, g, or t
  misc_feature (1235)..(1235): n is a, c, g, or t
  misc_feature (1249)..(1249): n is a, c, g, or t
  misc_feature (1255)..(1255): n is a, c, g, or t
  misc_feature (1263)..(1263): n is a, c, g, or t
  misc_feature (1265)..(1265): n is a, c, g, or t
  misc_feature (1269)..(1269): n is a, c, g, or t
  misc_feature (1272)..(1272): n is a, c, g, or t
  misc_feature (1276)..(1276): n is a, c, g, or t
  misc_feature (1292)..(1292): n is a, c, g, or t
  misc_feature (1309)..(1310): n is a, c, g, or t
  misc_feature (1312)..(1312): n is a, c, g, or t
  misc_feature (1316)..(1316): n is a, c, g, or t
  misc_feature (1319)..(1319): n is a, c, g, or t
  misc_feature (1325)..(1326): n is a, c, g, or t
  misc_feature (1328)..(1328): n is a, c, g, or t
  misc_feature (1330)..(1330): n is a, c, g, or t
  misc_feature (1339)..(1339): n is a, c, g, or t
  misc_feature (1343)..(1343): n is a, c, g, or t
  misc_feature (1348)..(1348): n is a, c, g, or t
  misc_feature (1352)..(1352): n is a, c, g, or t
  misc_feature (1357)..(1358): n is a, c, g, or t
  misc_feature (1360)..(1360): n is a, c, g, or t
  misc_feature (1364)..(1364): n is a, c, g, or t
  misc_feature (1372)..(1373): n is a, c, g, or t
  misc_feature (1377)..(1380): n is a, c, g, or t
  misc_feature (1388)..(1389): n is a, c, g, or t
tagagaaattaactatgaagaggatcgcatcaccatcaccatcacggatcctatttaggtgacactatagaatcgtcgacccacgcgtccgctagaaatggaggacaggcctcatcgtctcctaattatgaaggacccttacactctttgcaaagccgaattgaagatcgtttagaaagactggatgatgctattcatgttctccggaaccatgcagtgggcccatccacagctatgcctggtggtcatggggacatgcatggaatcattggaccttctcataatggagccatgggtggtctgggctcagggtatggaaccggccttctttcagccaacagacattcactcatggtggggacccatcgtgaagatggcgtggccctgagaggcagccattctcttctgccaaaccaggttccggttccacagcttcctgtccagtctgcgacttcccctgacctgaacccaccccaggacccttacagaggcatgccaccaggactacaggggcagagtgtctcctctggcagctctgagatcaaatccgatgacgagggtgatgagaacctgcaagacacgaaatcttcggaggacaagaaattagatgacgacaagaaggatatcaaatcaattactaggtcaagatctagcaataatgacgatgaggacctgacaccagagcagaaggcagagcgtgagaaggagcggaggatggccaacaatgcccgagagcgtctgcgggtccgtgacatcaacgaggctttcaaagagctcggccgcatggtgcagctccacctcaagagtgacaagccccagaccaagctcctgatcctccaccaggcggtggccgtcatcctcagtctggagcancaagtccgagaaaggaatctgaatccgaaagctgcgtgtctgaaaanaaaggangaaaanaangtgtcctcaaagcctccccctctctcctnggccggcccacaccctggaatgggananccatcgantcncatggganaaagtaaaagggtcnagttgcccattgctncntaaaaaaananaccncttcttaanaactgtatnatcttaaacccaaanaaacctttcctaaaccccnttttngtaaanaaaaanantntgaaaantttnnaatcncaaacccaaagttnccccttccccttttcaaaacgaaacaaaaaaaaaaaaaggggngcccnccnaagggngcnataacttatacnaacttgacccgggnaaaccnaaaacccnancccnggntttnaaaccggggcccgggnttttttgggaaaccccnntngganttnggccgnncnanggaaaaacnggtnccccntatnccggnncnaaanttggtttnntttnnnntaaaaccnnttaatttttaa

SEQ ID NO: 101 - DNA, 1200 bp, Homo Sapiens
  misc_feature (850)..(850): n is a, c, g, or t
  misc_feature (867)..(867): n is a, c, g, or t
  misc_feature (892)..(892): n is a, c, g, or t
  misc_feature (899)..(899): n is a, c, g, or t
  misc_feature (911)..(912): n is a, c, g, or t
  misc_feature (915)..(915): n is a, c, g, or t
  misc_feature (919)..(919): n is a, c, g, or t
  misc_feature (932)..(932): n is a, c, g, or t
  misc_feature (934)..(934): n is a, c, g, or t
  misc_feature (948)..(948): n is a, c, g, or t
  misc_feature (956)..(956): n is a, c, g, or t
  misc_feature (975)..(975): n is a, c, g, or t
  misc_feature (980)..(980): n is a, c, g, or t
  misc_feature (989)..(989): n is a, c, g, or t
  misc_feature (1001)..(1001): n is a, c, g, or t
  misc_feature (1016)..(1016): n is a, c, g, or t
  misc_feature (1019)..(1019): n is a, c, g, or t
  misc_feature (1029)..(1029): n is a, c, g, or t
  misc_feature (1033)..(1033): n is a, c, g, or t
  misc_feature (1045)..(1045): n is a, c, g, or t
  misc_feature (1050)..(1050): n is a, c, g, or t
  misc_feature (1053)..(1055): n is a, c, g, or t
  misc_feature (1060)..(1061): n is a, c, g, or t
  misc_feature (1066)..(1066): n is a, c, g, or t
  misc_feature (1071)..(1071): n is a, c, g, or t
  misc_feature (1079)..(1079): n is a, c, g, or t
  misc_feature (1081)..(1082): n is a, c, g, or t
  misc_feature (1088)..(1092): n is a, c, g, or t
  misc_feature (1094)..(1094): n is a, c, g, or t
  misc_feature (1096)..(1097): n is a, c, g, or t
  misc_feature (1102)..(1104): n is a, c, g, or t
  misc_feature (1107)..(1107): n is a, c, g, or t
  misc_feature (1116)..(1116): n is a, c, g, or t
  misc_feature (1118)..(1119): n is a, c, g, or t
  misc_feature (1124)..(1124): n is a, c, g, or t
  misc_feature (1126)..(1126): n is a, c, g, or t
  misc_feature (1128)..(1128): n is a, c, g, or t
  misc_feature (1133)..(1133): n is a, c, g, or t
  misc_feature (1143)..(1143): n is a, c, g, or t
  misc_feature (1145)..(1147): n is a, c, g, or t
  misc_feature (1149)..(1150): n is a, c, g, or t
  misc_feature (1157)..(1160): n is a, c, g, or t
  misc_feature (1166)..(1168): n is a, c, g, or t
  misc_feature (1170)..(1173): n is a, c, g, or t
  misc_feature (1176)..(1176): n is a, c, g, or t
  misc_feature (1178)..(1178): n is a, c, g, or t
  misc_feature (1186)..(1186): n is a, c, g, or t
  misc_feature (1188)..(1188): n is a, c, g, or t
  misc_feature (1194)..(1195): n is a, c, g, or t
tagagagaattactatgagaggatcgcatcaccatcaccatcacggatcctatttaggtgacactatagaatcgtcgacccacgcgtccgggtcggaaaaaagggagaagaaaccggcaccctctctgagaggcaacagaagcagcaattgtttcagcgaaaaaagcagcaagggagggagtgaaggaaaaaagcaaaaaagggggcgacacgcaagtgcctgtaggggtgaaaggagcagggaccggcgatctagggggggatcagctacaaaagaaactgtcactgggagcggtgcggccaaggaggaagcagtgctgccaggctctgctccagggcacagctggctggcggctgccctgtccgcagcaaaggggcacaggccggggaccgcgagaggtggcaaagtggcaccgggcgccgaggctgctgagcgctcgccgagacggcgaccggactggctgccccggaactgcggcgactctccctactcagaacttggcctacgtttcccaggactctccccatctccagaggcccccacaaaaccgggaaaggaaggaaaggacagcggcggcagcagctcaatgagtgcctacagcagaaagcctgaacgagctcggtcgtaggcgggaagttcccgggggggctgcccagtgcagccgcaatgctgccgcgagctgccccagcagtccgggctccgtagacgctttccgcatcactctccttcctcgggctgccgggagtcccgggacctggcggggccggcatgacgggcttctcgggggcccgccgcacgcccggcagcctccggagacgcgcgccgagcccggctcccacggcctctgangctcggcgggggctgcngctgcctggcgggcgggctccgganctttctngagcggcattannccncggnttggccccggacncnaccaaaggctcttntggaaaancccaaaacactgggcatcnttacnacctgtaanttgaggccaccnaattgctactcccgntcnccttttggcnattntttttttaaccntccgnaannnttcannatccnacccnccgggggntnntcccannnnngnannacccnnnaantttcctttngnnaaaangnangaaanccaacccctngnnnanntgccctnnnnttttcnnncnnnnttnantccccccngnaaaggnncctaa

SEQ ID NO: 102 - DNA, 1200 bp, Homo Sapiens
  misc_feature (917)..(917): n is a, c, g, or t
  misc_feature (920)..(920): n is a, c, g, or t
  misc_feature (923)..(923): n is a, c, g, or t
  misc_feature (931)..(931): n is a, c, g, or t
  misc_feature (934)..(934): n is a, c, g, or t
  misc_feature (937)..(937): n is a, c, g, or t
  misc_feature (954)..(954): n is a, c, g, or t
  misc_feature (966)..(966): n is a, c, g, or t
  misc_feature (976)..(976): n is a, c, g, or t
  misc_feature (982)..(983): n is a, c, g, or t
  misc_feature (990)..(993): n is a, c, g, or t
  misc_feature (996)..(998): n is a, c, g, or t
  misc_feature (1000)..(1001): n is a, c, g, or t
  misc_feature (1003)..(1005): n is a, c, g, or t
  misc_feature (1022)..(1022): n is a, c, g, or t
  misc_feature (1026)..(1026): n is a, c, g, or t
  misc_feature (1029)..(1029): n is a, c, g, or t
  misc_feature (1038)..(1038): n is a, c, g, or t
  misc_feature (1040)..(1040): n is a, c, g, or t
  misc_feature (1044)..(1044): n is a, c, g, or t
  misc_feature (1052)..(1052): n is a, c, g, or t
  misc_feature (1059)..(1059): n is a, c, g, or t
  misc_feature (1065)..(1065): n is a, c, g, or t
  misc_feature (1068)..(1068): n is a, c, g, or t
  misc_feature (1077)..(1077): n is a, c, g, or t
  misc_feature (1081)..(1081): n is a, c, g, or t
  misc_feature (1091)..(1091): n is a, c, g, or t
  misc_feature (1102)..(1103): n is a, c, g, or t
  misc_feature (1109)..(1109): n is a, c, g, or t
  misc_feature (1111)..(1111): n is a, c, g, or t
  misc_feature (1119)..(1120): n is a, c, g, or t
  misc_feature (1124)..(1124): n is a, c, g, or t
  misc_feature (1126)..(1126): n is a, c, g, or t
  misc_feature (1140)..(1141): n is a, c, g, or t
  misc_feature (1148)..(1148): n is a, c, g, or t
  misc_feature (1163)..(1164): n is a, c, g, or t
  misc_feature (1167)..(1167): n is a, c, g, or t
  misc_feature (1176)..(1177): n is a, c, g, or t
  misc_feature (1186)..(1186): n is a, c, g, or t
  misc_feature (1197)..(1197): n is a, c, g, or t
attagagaaattactatgagaggatcgcatcaccatcaccatcacggatcctatttaggtgacactatagaatcgtcgacccacgcgtccgcggacgcgtgggggggtaacaagatggcgaccgagacggtggagctccataagctaaagcttgccgaactaaagcaagaatgtcttgctcgtggtttggagaccaagggaataaagcaagatcttatccacagactccaggcatatcttgaagaacatgctgaagaggaggcaaatgaagaagatgtactgggagatgaaacagaggaagaagaaacaaagcccattgagctccctgtcaaagaggaagaaccccctgaaaaaactgttgatgtggcagcagagaagaaagtggtgaaaattacatctgaaataccacagactgagagaatgcagaagagggctgaacgattcaatgtacctgtgagcttggagagtaagaaagctgctcgggcagctaggtttgggatttcttcagttccaacaaaaggtctgtcatctgataacaaacctatggttaacttggataagctgaaggaaagagctcaaagatttggtttgaatgtctcttcaatctccagaaagtctgaagatgatgagaaactgaaaaagaggaaggagcgatttgggattgtcacaagttcagctggaactggaaccacagaggatacagaggcaaagaagaggaaaagagcagagcgctttgggattgcctgatgaaaagttcctgatactttctgttctccagtgttttccatttctctccttcttcttggtcacatatatgcctaaatgcacagtcatgtgcctacgtcctgcctcgcaatgagggagcatgtaccccaggtacatccatgaactgcggcagcagtttgacttattgctgnttncancttaaggntgntgngttttgtttttgattangttgcttgttantaaaaaaaanttggannggagaannnnaannnannannnaaaaaagggcggccccncccnatnaggggcccnantaancttaattnacctgancttggnacncctgttganaaancccgtaatgnccccccaaacnncctctngnatttttcnnaaancncggttgcccccggnnttttttnttggggaaaatcccnnctncttggcgannttttccggnccttagggaancta

SEQ ID NO: 103 - DNA, 1268 bp, Homo Sapiens
  misc_feature (744)..(744): n is a, c, g, or t
  misc_feature (888)..(888): n is a, c, g, or t
  misc_feature (985)..(985): n is a, c, g, or t
  misc_feature (1001)..(1001): n is a, c, g, or t
  misc_feature (1006)..(1006): n is a, c, g, or t
  misc_feature (1017)..(1017): n is a, c, g, or t
  misc_feature (1020)..(1020): n is a, c, g, or t
  misc_feature (1032)..(1032): n is a, c, g, or t
  misc_feature (1041)..(1041): n is a, c, g, or t
  misc_feature (1071)..(1071): n is a, c, g, or t
  misc_feature (1074)..(1074): n is a, c, g, or t
  misc_feature (1076)..(1076): n is a, c, g, or t
  misc_feature (1081)..(1081): n is a, c, g, or t
  misc_feature (1087)..(1087): n is a, c, g, or t
  misc_feature (1100)..(1100): n is a, c, g, or t
  misc_feature (1104)..(1104): n is a, c, g, or t
  misc_feature (1126)..(1126): n is a, c, g, or t
  misc_feature (1128)..(1128): n is a, c, g, or t
  misc_feature (1135)..(1135): n is a, c, g, or t
  misc_feature (1139)..(1139): n is a, c, g, or t
  misc_feature (1162)..(1162): n is a, c, g, or t
  misc_feature (1167)..(1167): n is a, c, g, or t
  misc_feature (1170)..(1170): n is a, c, g, or t
  misc_feature (1173)..(1173): n is a, c, g, or t
  misc_feature (1184)..(1184): n is a, c, g, or t
  misc_feature (1191)..(1191): n is a, c, g, or t
  misc_feature (1193)..(1193): n is a, c, g, or t
  misc_feature (1211)..(1211): n is a, c, g, or t
  misc_feature (1215)..(1215): n is a, c, g, or t
  misc_feature (1221)..(1221): n is a, c, g, or t
  misc_feature (1229)..(1229): n is a, c, g, or t
  misc_feature (1246)..(1247): n is a, c, g, or t
  misc_feature (1254)..(1254): n is a, c, g, or t
  misc_feature (1259)..(1259): n is a, c, g, or t
  misc_feature (1263)..(1263): n is a, c, g, or t
  misc_feature (1265)..(1265): n is a, c, g, or t
tagagaaattactatgagaggatcgcatcaccatcaccatcacggatcctatttaggtgacactatagaatcgtcgacccacgcgtccgcccacgcgtccgggcggcgggatggaggcggcggccgagcctggaaacctggccggcgtcaggcacatcatcctggtcctctcaggaaaggggggcgttgggaaaagcaccatctccacggagctggccctggcactgcgccatgcaggcaagaaggtgggaatcctggatgtggacctgtgtggccccagtatcccccgcatgctcggggcgcagggcagggctgtgcaccagtgcgaccgcggctgggcacccgtcttcctggaccgggagcagagcatctcgctcatgtctgtgggcttcctgctggagaagccggacgaggccgtggtgtggagaggccccaagaaaaacgcgctgataaagcagtttgtgtccgacgtggcctggggggagctggactacctggtggtggacacgcccccggggacctccgatgagcacatggccaccatagaagccctgcgtccctaccagcccctgggggccctcgtggtcaccacgccccaggcggtgtccgtgggggacgtgaggcgcgagctgaccttctgtaggaagacgggcttgcgggtgatgggaatcgtggagaatatgagcggcttcacctgcccacactgcacggagtgcaccagcgtcttctccaggggcggcgganaggagctggcccagctcgccggggtgcccttcttaagctccgtgcccctggaaccctgcgctcatgaggaccctggaggaagggccacgacttcatccaggaagttccccgggagccccgccttcgctgcactcacctccatancccaaaaaattctggacgcgacgcccgcgtgcctccccttgactaaaggccaccttgcagccgcttttccaggcccaccaaggggctctgcttccanccttttcaaaaaaaanaaaangcctggggctncgntttccggggccntgcaggggncaggcccaagccaacgttcacgggaaaaanttntnccccnaacaancccaaccccaaanaatnttttccacccaacaaccttttncnttggttnggcntgcaaaggcccggggtttttgcntgctnttnccnccttttaaaanggggggngnccttgggcttttttcccnatcnaggttncccaaccngggcccccgggaacccnnggttccnaaaantttngngaa

SEQ ID NO: 104 - DNA, 1367 bp, Homo Sapiens
  misc_feature (2)..(3): n is a, c, g, or t
  misc_feature (7)..(7): n is a, c, g, or t
  misc_feature (752)..(752): n is a, c, g, or t
  misc_feature (785)..(785): n is a, c, g, or t
  misc_feature (885)..(885): n is a, c, g, or t
  misc_feature (918)..(918): n is a, c, g, or t
  misc_feature (930)..(930): n is a, c, g, or t
  misc_feature (985)..(985): n is a, c, g, or t
  misc_feature (990)..(990): n is a, c, g, or t
  misc_feature (1003)..(1003): n is a, c, g, or t
  misc_feature (1007)..(1007): n is a, c, g, or t
  misc_feature (1010)..(1010): n is a, c, g, or t
  misc_feature (1016)..(1016): n is a, c, g, or t
  misc_feature (1034)..(1034): n is a, c, g, or t
  misc_feature (1045)..(1045): n is a, c, g, or t
  misc_feature (1050)..(1050): n is a, c, g, or t
  misc_feature (1060)..(1061): n is a, c, g, or t
  misc_feature (1078)..(1078): n is a, c, g, or t
  misc_feature (1091)..(1091): n is a, c, g, or t
  misc_feature (1093)..(1093): n is a, c, g, or t
  misc_feature (1106)..(1106): n is a, c, g, or t
  misc_feature (1112)..(1113): n is a, c, g, or t
  misc_feature (1119)..(1119): n is a, c, g, or t
  misc_feature (1121)..(1121): n is a, c, g, or t
  misc_feature (1128)..(1128): n is a, c, g, or t
  misc_feature (1132)..(1132): n is a, c, g, or t
  misc_feature (1137)..(1137): n is a, c, g, or t
  misc_feature (1143)..(1143): n is a, c, g, or t
  misc_feature (1146)..(1146): n is a, c, g, or t
  misc_feature (1159)..(1159): n is a, c, g, or t
  misc_feature (1164)..(1164): n is a, c, g, or t
  misc_feature (1170)..(1171): n is a, c, g, or t
  misc_feature (1174)..(1174): n is a, c, g, or t
  misc_feature (1177)..(1177): n is a, c, g, or t
  misc_feature (1190)..(1190): n is a, c, g, or t
  misc_feature (1210)..(1210): n is a, c, g, or t
  misc_feature (1215)..(1215): n is a, c, g, or t
  misc_feature (1229)..(1229): n is a, c, g, or t
  misc_feature (1231)..(1231): n is a, c, g, or t
  misc_feature (1254)..(1254): n is a, c, g, or t
  misc_feature (1258)..(1258): n is a, c, g, or t
  misc_feature (1263)..(1263): n is a, c, g, or t
  misc_feature (1272)..(1272): n is a, c, g, or t
  misc_feature (1275)..(1275): n is a, c, g, or t
  misc_feature (1281)..(1281): n is a, c, g, or t
  misc_feature (1283)..(1283): n is a, c, g, or t
  misc_feature (1287)..(1287): n is a, c, g, or t
  misc_feature (1295)..(1295): n is a, c, g, or t
  misc_feature (1316)..(1317): n is a, c, g, or t
  misc_feature (1319)..(1319): n is a, c, g, or t
  misc_feature (1324)..(1325): n is a, c, g, or t
  misc_feature (1332)..(1334): n is a, c, g, or t
  misc_feature (1336)..(1336): n is a, c, g, or t
  misc_feature (1339)..(1339): n is a, c, g, or t
  misc_feature (1341)..(1341): n is a, c, g, or t
  misc_feature (1346)..(1346): n is a, c, g, or t
  misc_feature (1348)..(1349): n is a, c, g, or t
  misc_feature (1359)..(1361): n is a, c, g, or t
  misc_feature (1363)..(1363): n is a, c, g, or t
  misc_feature (1367)..(1367): n is a, c, g, or t
cnncaanttagagaaattactatgagaggatcgcatcaccatcaccatcacggatcctatttaggtgacactatagaatcgtcgacccacgcgtccgcggacgcgtgggcggacgcgtgggcggacgcgtggggcaagagtggaggccctgggtcaggcagatctagattcaaactcccgagaagggtggagggaagtgctccaagcagagcagagactgaaggcgggagagcctggtgcaccgcggacctgcagggggaaggcgtgagagctcggtgcactggggacctgcatggggaaggcgggagagctcggtgcactggggacctgcatggggaaggcgtgagagctcggtgcactggggacctgcatggggaaggcgggagagctcggtgcacctcggacctgcagagggaaggtgggagagcttggtgcaccgcagacctgcagggggaaggcgggagagcttggtgcactgcagacctgcggggggaaggtgggagagcttggtgcactgcagacctgcggggggttccatattggcagaacaagattgggtggccatgccaagaggtgacagcagggagaagcgggggcagattcagggcctgctgctgcccatgggcagaggagagatggtcaggggtacccgacaggtctttggctgtggaggtggaatgaggggactcgaggcagggaagctgacaggcttgccaagaaaccagatgagtagggaactggtattgacccanagcctggggcaagcctggccctgtgagtggcantaggggcctcgggtgagtgggaggttctgccgccccccctggtttccaccttacctgggcaggaaaagtggcccttgtgcaaacataaacgttttggtanctgcgggtcaagctgcggctatatttctccagnttgttccagccnttttggttgaagtgggggcccctggtaaggaaaaatagggccttaaccaggactnttgcntggaccccttccncctnttntcaaanggcccccccccaggttcntgaagggatgnacagnctccaaaaannttccattgaaaaaaacnggggggaaacctnangcttcaaggaaanaaattnncctccntnaaacccncggnttaanaaaatnctnacccccccccctnttttncctccnnaanccnaagtttcaaattntttttcccctccccaaaatncaaanaaaaaaaaaccctntnccccccttttaaaaaaaaaaaancttntcccnccccccccnggnttcctnanaaanaacctttnaaaaaaaccttttttttcccnntnaaccnnaaaaaannntnggnanttttnanncccccctctnnncncccn

SEQ ID NO: 105 - DNA, 256 bp, Homo Sapiens
ggacgcgtgggttccggcgctccgggtgcgagagacaggtcgggccccctaggcagcgagccgcagcgcaatcccggcgctcgcccaaggaccctggaagctaccgttaccccgccgggcagcgtgggcgccatgagcagctcgggactgaattcggagaaggtagctgctctgatacagaaactgaattccgacccccagttcgtacttgcccagaatgtcgggaccacccacgacctgctggacatctgtctga

SEQ ID NO: 106 - DNA, 1212 bp, Homo Sapiens
  misc_feature (50)..(50): n is a, c, g, or t
  misc_feature (849)..(849): n is a, c, g, or t
  misc_feature (868)..(868): n is a, c, g, or t
  misc_feature (936)..(936): n is a, c, g, or t
  misc_feature (951)..(951): n is a, c, g, or t
  misc_feature (967)..(967): n is a, c, g, or t
  misc_feature (976)..(976): n is a, c, g, or t
  misc_feature (996)..(996): n is a, c, g, or t
  misc_feature (998)..(998): n is a, c, g, or t
  misc_feature (1003)..(1003): n is a, c, g, or t
  misc_feature (1007)..(1007): n is a, c, g, or t
  misc_feature (1014)..(1015): n is a, c, g, or t
  misc_feature (1030)..(1030): n is a, c, g, or t
  misc_feature (1032)..(1032): n is a, c, g, or t
  misc_feature (1059)..(1059): n is a, c, g, or t
  misc_feature (1079)..(1079): n is a, c, g, or t
  misc_feature (1083)..(1083): n is a, c, g, or t
  misc_feature (1089)..(1089): n is a, c, g, or t
  misc_feature (1101)..(1101): n is a, c, g, or t
  misc_feature (1107)..(1107): n is a, c, g, or t
  misc_feature (1127)..(1127): n is a, c, g, or t
  misc_feature (1132)..(1132): n is a, c, g, or t
  misc_feature (1135)..(1135): n is a, c, g, or t
  misc_feature (1137)..(1137): n is a, c, g, or t
  misc_feature (1144)..(1144): n is a, c, g, or t
  misc_feature (1151)..(1151): n is a, c, g, or t
  misc_feature (1165)..(1165): n is a, c, g, or t
  misc_feature (1178)..(1178): n is a, c, g, or t
  misc_feature (1184)..(1184): n is a, c, g, or t
  misc_feature (1186)..(1186): n is a, c, g, or t
  misc_feature (1198)..(1198): n is a, c, g, or t
  misc_feature (1200)..(1200): n is a, c, g, or t
  misc_feature (1207)..(1207): n is a, c, g, or t
tagaggaaaattactatgaagagggatcgcatcaccatcaccatcacggnatcctatttagggtgacactatagaatcgtcgacccacgcgtccgcccacgcgtccgcgcagtggaagaaacattggtttgtgctgacagattcaagtctcaaatattacagagactccactgctgaggaggcagatgagctggatggtgagatcgacctgcgttcctgcacggatgtcactgagtacgcggtacagcgcaactatggcttccagatccacaccaaggatgctgtctataccttgtcggccatgacctcaggcatccggcggaactggatcgaggctctgagaaagaccgtacgtccaacttcagccccagatgtcaccaagctctcggactctaacaaggagaacgcgctgcacagctacagcacccagaagggccccctgaaggcaggggagcagcgggcgggctctgaggtcatcagccggggtggccctcggaaggcggacgggcagcgtcaggccttggactacgtggagctctcgccgctgacccaggcttccccgcagcgggcccgcaccccagcccgcactcctgaccgcctggccaagcaggaggagctggagcgggacctggcccagcgctccgaggagcggcgcaagtggtttgaggccacagacagcaggaccccagaggtgcctgctggtgaggggccgcgccggggcctgggtgcccccctgactgaggaccagcaaaaccggcttagtgaggagatcgagaagaagtggcaggagctggagaagctgcccctgcgggagaataagcgggtgccccctcactgccctgctcaacnaaagccgcggagagcgccnaagggcccccaagtgacggccacgaggcactggagaaggaggttcaggctcttcgggcccagctggangcgtggcgtctccanggggaggctcctcaantgcactganatcccaggaagatggccccntnccccngggntaatttnnaaggaggcatgtgancncaccctggcaaaaaggaatcctccccnccagggatggagaactgcancgcncccaancggaactgcacncctgcncaaaaaaagaatggttctgnttaanaangnaccccgncctcccnttgaacctgaaaangctcccgaaaaantaaccnangtgaaaaaacgnantccccgngggcc

SEQ ID NO: 107 - DNA, 1200 bp, Homo Sapiens
  misc_feature (965)..(965): n is a, c, g, or t
  misc_feature (977)..(977): n is a, c, g, or t
  misc_feature (985)..(985): n is a, c, g, or t
  misc_feature (990)..(990): n is a, c, g, or t
  misc_feature (992)..(992): n is a, c, g, or t
  misc_feature (1003)..(1003): n is a, c, g, or t
  misc_feature (1065)..(1065): n is a, c, g, or t
  misc_feature (1069)..(1069): n is a, c, g, or t
  misc_feature (1073)..(1073): n is a, c, g, or t
  misc_feature (1091)..(1091): n is a, c, g, or t
  misc_feature (1102)..(1102): n is a, c, g, or t
  misc_feature (1133)..(1133): n is a, c, g, or t
  misc_feature (1139)..(1140): n is a, c, g, or t
  misc_feature (1142)..(1142): n is a, c, g, or t
  misc_feature (1147)..(1147): n is a, c, g, or t
  misc_feature (1169)..(1169): n is a, c, g, or t
tagagagattactatgagaggatcgcatcaccatcaccatcacggatcctatttaggtgacactatagaatcgtcgacccacgcgtccggtgaaggtaatcatcctgcattagctgtggaagacttgggatgtggggtgatacaggtagatgaagataattgtaaggaagaaaaggcacaagtggcaaacaggcctttaaaatgcattgttgaggaaacctatatcgacttgaccacagaatctcccagttcatgtgaagtaaaaaaagatgagttaaaatcagagccaggatcaaattgtgataactcggagttgcctgggactttgcataattctcacaaaaagagaagaaacatttctgatctaaatcatcctcataaaaaacaaagaaaggaaacagacttaactaataaggaaaagaccaagaaacctacccaagattcttgtgagaatactgaagctcaccaaaagaaagccagtaagaagaaggcccctcctgtgactaaagatccctcatcattaaaggcaaccccagggattaaggattcatcagcagcacttgccacttctacaagtctttctgcaaaaaatgttattaaaaagaagggagaaattatcattttatggacaagaaatgatgaccgggaaattttattggagtgtcagaaaagagggccatcatttaaaacatttgcatatttagccgccaagttggataaaaatccaaatcaggtctcagaaagattccagcagctaatgaagctctttgaaaagtcaaaatgcaggtagttaatggttacactacaggagactagtaaaataaatgtttgacactgtagttgtgcagttaatggcctgttagtcattgaagatgtgaatagtgggtgagagacatccagttgagttcctgcttcagtcacaggttggaggatgattgctcgagcaggcatctaaggtgacctcntccccagggacntgctcaantgaancntgctgcagttncaatcaccatggcatctctccccaccttctgattgctgaagagcctagggggggggaatccntttngatnaaaaaaaagttttttaanaaaaatcaaanttcttgaaaaacaaaatggggtttctaaccngggaanncnggganggagggaatttaaggttccccnatttttattagggccaattaaaaacaaaact

SEQ ID NO: 108 - DNA, 1229 bp, Homo Sapiens
  misc_feature (1)..(1): n is a, c, g, or t
  misc_feature (3)..(3): n is a, c, g, or t
  misc_feature (902)..(902): n is a, c, g, or t
  misc_feature (920)..(920): n is a, c, g, or t
  misc_feature (961)..(961): n is a, c, g, or t
  misc_feature (978)..(979): n is a, c, g, or t
  misc_feature (1004)..(1004): n is a, c, g, or t
  misc_feature (1024)..(1024): n is a, c, g, or t
  misc_feature (1032)..(1032): n is a, c, g, or t
  misc_feature (1036)..(1036): n is a, c, g, or t
  misc_feature (1043)..(1043): n is a, c, g, or t
  misc_feature (1063)..(1063): n is a, c, g, or t
  misc_feature (1068)..(1068): n is a, c, g, or t
  misc_feature (1077)..(1078): n is a, c, g, or t
  misc_feature (1080)..(1080): n is a, c, g, or t
  misc_feature (1089)..(1089): n is a, c, g, or t
  misc_feature (1091)..(1091): n is a, c, g, or t
  misc_feature (1111)..(1111): n is a, c, g, or t
  misc_feature (1113)..(1113): n is a, c, g, or t
  misc_feature (1133)..(1133): n is a, c, g, or t
  misc_feature (1143)..(1144): n is a, c, g, or t
  misc_feature (1146)..(1146): n is a, c, g, or t
  misc_feature (1164)..(1164): n is a, c, g, or t
  misc_feature (1172)..(1172): n is a, c, g, or t
  misc_feature (1174)..(1174): n is a, c, g, or t
  misc_feature (1176)..(1176): n is a, c, g, or t
  misc_feature (1183)..(1183): n is a, c, g, or t
  misc_feature (1185)..(1185): n is a, c, g, or t
  misc_feature (1190)..(1190): n is a, c, g, or t
  misc_feature (1193)..(1193): n is a, c, g, or t
  misc_feature (1199)..(1199): n is a, c, g, or t
  misc_feature (1216)..(1216): n is a, c, g, or t
  misc_feature (1222)..(1222): n is a, c, g, or t
  misc_feature (1227)..(1227): n is a, c, g, or t
nantagagaaattactatgagaggatcgcatcaccatcaccatcacggatcctatttaggtgacactatagaatcgtcgacccacgcgtccggcgcgccggagcccaaattccaagtggaaactgcaggcgcacgagggaggaacgcgtggagcatgaaaaggcagggggcctcctctgagcgaaaacgagcgcggataccgtccgggaaggccggagcagcaaatggatttctcatggaagtttgtgttgattcagtggaatcagctgtgaatgcagaaagaggaggtgctgatcggattgaattatgttctggtttatcagaggggggaactacacccagcatgggtgtccttcaagtagtgaagcagagtgttcagatcccagtttttgtgatgattcggccacggggaggtgattttttgtattcagatcgtgaaattgaggtgatgaaggctgacattcgtcttgccaagctttatggtgctgatggtttggtttttggggcattgactgaagatggacacattgacaaagagctgtgtatgtcccttatggctatttgccgccctctgccagtcactttccaccgagcctttgacatggttcatgatccaatggcagctctggagaccctcttaaccttgggatttgaacgcgtgttgaccagtggatgtgacagttcagcattagaagggctacccctaataaagcgactcattgagcaggcaaaaggcaggattgtggtaatgccaggaggtggtataacagacagaaatctacaaaggatccttgagggttcaggtgctacagaattccactgttctgctcggtctactagagactcgggaatgaagtttcgaaattcatctgttgccatgggagcctcactttcttgctcanaatattccctaaaggtancagatgtgaccaaagtaaggactttgaatgctatcgcaaanaacatcctggtgtaccnnaaccctctgaaaaacatggatatcncaggatgaaggtagaacttnatctgcanttcnctatganccagctttaaccttcttccntggcnagaaagtcnnanctttgtttnangtttccatggccctggaaangngccccaaaaaaaaaaaattnaaaaaaaatnngnccttccttgctaaccctncaggatgncncngggtaangngggcnggncttctnccaaaaaaaacttaacngtttcnggganta

SEQ ID NO: 109 - DNA, 256 bp, Homo Sapiens
  misc_feature (6)..(6): n is a, c, g, or t
  misc_feature (90)..(90): n is a, c, g, or t
  misc_feature (99)..(99): n is a, c, g, or t
  misc_feature (101)..(102): n is a, c, g, or t
  misc_feature (108)..(108): n is a, c, g, or t
  misc_feature (116)..(116): n is a, c, g, or t
  misc_feature (127)..(128): n is a, c, g, or t
  misc_feature (133)..(135): n is a, c, g, or t
  misc_feature (146)..(148): n is a, c, g, or t
  misc_feature (150)..(150): n is a, c, g, or t
  misc_feature (164)..(164): n is a, c, g, or t
  misc_feature (168)..(168): n is a, c, g, or t
  misc_feature (178)..(178): n is a, c, g, or t
  misc_feature (193)..(193): n is a, c, g, or t
  misc_feature (202)..(202): n is a, c, g, or t
  misc_feature (231)..(231): n is a, c, g, or t
tagagnaattactatgagaggatcgcatcaccatcaccatcacggatcctatttaggtgacactatagaatcgtcgacccacgcgtccgnccacatttncnnaaaaanggttgagncttgcttaccnncgccnnnacccactcagnnnanggaatgtctccccnctgncagaactcangccattgctgcattnatttgcaanctgtgccgagtgaggactgtggagatatncatgacatgatcatgcctgaatgtc

SEQ ID NO: 110 - DNA, 1200 bp, Homo Sapiens
  misc_feature (15)..(15): n is a, c, g, or t
  misc_feature (17)..(17): n is a, c, g, or t
  misc_feature (19)..(20): n is a, c, g, or t
  misc_feature (24)..(24): n is a, c, g, or t
  misc_feature (31)..(31): n is a, c, g, or t
  misc_feature (41)..(41): n is a, c, g, or t
  misc_feature (48)..(48): n is a, c, g, or t
  misc_feature (55)..(55): n is a, c, g, or t
  misc_feature (85)..(85): n is a, c, g, or t
  misc_feature (98)..(98): n is a, c, g, or t
  misc_feature (915)..(915): n is a, c, g, or t
  misc_feature (967)..(967): n is a, c, g, or t
  misc_feature (969)..(969): n is a, c, g, or t
  misc_feature (972)..(972): n is a, c, g, or t
  misc_feature (996)..(996): n is a, c, g, or t
  misc_feature (1015)..(1015): n is a, c, g, or t
  misc_feature (1028)..(1028): n is a, c, g, or t
  misc_feature (1033)..(1033): n is a, c, g, or t
  misc_feature (1036)..(1036): n is a, c, g, or t
  misc_feature (1038)..(1038): n is a, c, g, or t
  misc_feature (1065)..(1066): n is a, c, g, or t
  misc_feature (1071)..(1071): n is a, c, g, or t
  misc_feature (1074)..(1087): n is a, c, g, or t
  misc_feature (1096)..(1096): n is a, c, g, or t
  misc_feature (1112)..(1112): n is a, c, g, or t
  misc_feature (1115)..(1115): n is a, c, g, or t
  misc_feature (1121)..(1121): n is a, c, g, or t
  misc_feature (1124)..(1124): n is a, c, g, or t
  misc_feature (1137)..(1137): n is a, c, g, or t
  misc_feature (1146)..(1146): n is a, c, g, or t
  misc_feature (1149)..(1149): n is a, c, g, or t
  misc_feature (1157)..(1157): n is a, c, g, or t
  misc_feature (1163)..(1163): n is a, c, g, or t
  misc_feature (1181)..(1181): n is a, c, g, or t
  misc_feature (1188)..(1188): n is a, c, g, or t
  misc_feature (1193)..(1193): n is a, c, g, or t
  misc_feature (1196)..(1196): n is a, c, g, or t
tttgaggaaaaattncntnntagnagggatngcatcaccantcaccantcacggnatcctatttagggtgacactatagaatcgntcgacccacgcgntccgagaccttctcctcttcctcctcatccaagaagatgggcagcatcttcgaccgcgaggaccaggccagcccacgggccggcagcctggcggcgctcgagaaacggcaggccgagaagaagaaagagctgatgaaggcgcagagtctgcccaagacctcagcctcccaggcgcgcaaggccatgattgagaagctggagaaggagggcgcggccggcagccctggcggaccccgcgcagccgtgcagcgatccaccagcttcggggtccccaacgccaacagcatcaagcagatgctgctggactggtgtcgagccaagactcgcggctacgagcacgtcgacatccagaacttctcctccagctggagtgatgggatggccttctgtgccctggtgcacaacttcttccctgaggccttcgactatgggcagcttagccctcagaaccgacgccagaacttcgaggtggccttctcatctgcggagacccatgcggactgcccgcagctcctggatacagaggacatggtgcggcttcgagagcctgactggaagtgcgtgtacacgtacatccaggaattctaccgctgtctggtccagaaggggctggtaaaaaccaaaaagtcctaacccctgctcggggccccacggatgctggtggactgtgtgcccctggtggaggtggacgacatgatgatcatgggcaagaagcctgaccccaagtgtgtcttcacctatgtgcagtcgctctacaaccacctgcgacgccacgaaactgcgcctgcgcggcaagaatgtctagcctgcccgcccngcatggccagccagtggcaaagctgccgcccccactctccgggcaccgtctncntgnctgtgcgtccgcccacggctgccntgtctgttgcgacaccttncccccccacatanacacncangnttttgataaattattggttttcaccgnnaaaanaannnnnnnnnnnnnnaaagggggncccctcccttaagggntcnaataanctnatttactgaactnggactctgntgnaaaatccntaatgncctcaaacttcctttggnttttttnaaaanttngttg

SEQ ID NO: 111 - DNA, 1561 bp, Homo Sapiens
  misc_feature (234)..(234): n is a, c, g, or t
  misc_feature (290)..(290): n is a, c, g, or t
  misc_feature (294)..(294): n is a, c, g, or t
  misc_feature (298)..(298): n is a, c, g, or t
  misc_feature (315)..(315): n is a, c, g, or t
  misc_feature (409)..(409): n is a, c, g, or t
  misc_feature (411)..(411): n is a, c, g, or t
  misc_feature (415)..(415): n is a, c, g, or t
  misc_feature (438)..(438): n is a, c, g, or t
  misc_feature (443)..(444): n is a, c, g, or t
  misc_feature (448)..(450): n is a, c, g, or t
  misc_feature (456)..(456): n is a, c, g, or t
  misc_feature (465)..(465): n is a, c, g, or t
  misc_feature (467)..(467): n is a, c, g, or t
  misc_feature (472)..(472): n is a, c, g, or t
  misc_feature (476)..(476): n is a, c, g, or t
  misc_feature (480)..(480): n is a, c, g, or t
  misc_feature (487)..(490): n is a, c, g, or t
  misc_feature (496)..(496): n is a, c, g, or t
  misc_feature (498)..(499): n is a, c, g, or t
  misc_feature (501)..(501): n is a, c, g, or t
  misc_feature (514)..(516): n is a, c, g, or t
  misc_feature (518)..(518): n is a, c, g, or t
  misc_feature (523)..(523): n is a, c, g, or t
  misc_feature (535)..(537): n is a, c, g, or t
  misc_feature (539)..(540): n is a, c, g, or t
  misc_feature (544)..(544): n is a, c, g, or t
  misc_feature (557)..(558): n is a, c, g, or t
  misc_feature (561)..(562): n is a, c, g, or t
  misc_feature (565)..(565): n is a, c, g, or t
  misc_feature (572)..(574): n is a, c, g, or t
  misc_feature (579)..(579): n is a, c, g, or t
  misc_feature (583)..(585): n is a, c, g, or t
  misc_feature (590)..(590): n is a, c, g, or t
  misc_feature (592)..(592): n is a, c, g, or t
  misc_feature (598)..(598): n is a, c, g, or t
  misc_feature (600)..(602): n is a, c, g, or t
  misc_feature (604)..(605): n is a, c, g, or t
  misc_feature (616)..(617): n is a, c, g, or t
  misc_feature (624)..(624): n is a, c, g, or t
  misc_feature (627)..(628): n is a, c, g, or t
  misc_feature (636)..(636): n is a, c, g, or t
  misc_feature (643)..(643): n is a, c, g, or t
  misc_feature (648)..(648): n is a, c, g, or t
  misc_feature (655)..(655): n is a, c, g, or t
  misc_feature (658)..(658): n is a, c, g, or t
  misc_feature (660)..(660): n is a, c, g, or t
  misc_feature (666)..(666): n is a, c, g, or t
  misc_feature (669)..(669): n is a, c, g, or t
  misc_feature (672)..(672): n is a, c, g, or t
  misc_feature (674)..(674): n is a, c, g, or t
  misc_feature (677)..(677): n is a, c, g, or t
  misc_feature (679)..(680): n is a, c, g, or t
  misc_feature (683)..(683): n is a, c, g, or t
  misc_feature (685)..(687): n is a, c, g, or t
  misc_feature (694)..(694): n is a, c, g, or t
  misc_feature (697)..(697): n is a, c, g, or t
  misc_feature (704)..(704): n is a, c, g, or t
  misc_feature (706)..(706): n is a, c, g, or t
  misc_feature (711)..(711): n is a, c, g, or t
  misc_feature (714)..(715): n is a, c, g, or t
  misc_feature (719)..(719): n is a, c, g, or t
  misc_feature (725)..(725): n is a, c, g, or t
  misc_feature (729)..(729): n is a, c, g, or t
  misc_feature (731)..(731): n is a, c, g, or t
  misc_feature (733)..(733): n is a, c, g, or t
  misc_feature (738)..(738): n is a, c, g, or t
  misc_feature (742)..(742): n is a, c, g, or t
  misc_feature (761)..(762): n is a, c, g, or t
  misc_feature (765)..(765): n is a, c, g, or t
  misc_feature (767)..(767): n is a, c, g, or t
  misc_feature (770)..(771): n is a, c, g, or t
  misc_feature (774)..(774): n is a, c, g, or t
  misc_feature (781)..(781): n is a, c, g, or t
  misc_feature (783)..(783): n is a, c, g, or t
  misc_feature (785)..(785): n is a, c, g, or t
  misc_feature (787)..(787): n is a, c, g, or t
  misc_feature (789)..(789): n is a, c, g, or t
  misc_feature (792)..(792): n is a, c, g, or t
  misc_feature (796)..(796): n is a, c, g, or t
  misc_feature (798)..(798): n is a, c, g, or t
  misc_feature (800)..(804): n is a, c, g, or t
  misc_feature (807)..(807): n is a, c, g, or t
  misc_feature (810)..(810): n is a, c, g, or t
  misc_feature (815)..(815): n is a, c, g, or t
  misc_feature (821)..(821): n is a, c, g, or t
  misc_feature (825)..(825): n is a, c, g, or t
  misc_feature (834)..(834): n is a, c, g, or t
  misc_feature (839)..(840): n is a, c, g, or t
  misc_feature (843)..(844): n is a, c, g, or t
  misc_feature (846)..(847): n is a, c, g, or t
  misc_feature (851)..(851): n is a, c, g, or t
  misc_feature (853)..(853): n is a, c, g, or t
  misc_feature (855)..(855): n is a, c, g, or t
  misc_feature (857)..(859): n is a, c, g, or t
  misc_feature (863)..(864): n is a, c, g, or t
  misc_feature (866)..(867): n is a, c, g, or t
  misc_feature (873)..(873): n is a, c, g, or t
  misc_feature (881)..(881): n is a, c, g, or t
  misc_feature (885)..(886): n is a, c, g, or t
  misc_feature (892)..(892): n is a, c, g, or t
  misc_feature (897)..(899): n is a, c, g, or t
  misc_feature (901)..(901): n is a, c, g, or t
  misc_feature (911)..(911): n is a, c, g, or t
  misc_feature (915)..(915): n is a, c, g, or t
  misc_feature (919)..(920): n is a, c, g, or t
  misc_feature (924)..(924): n is a, c, g, or t
  misc_feature (927)..(929): n is a, c, g, or t
  misc_feature (948)..(948): n is a, c, g, or t
  misc_feature (956)..(956): n is a, c, g, or t
  misc_feature (959)..(959): n is a, c, g, or t
  misc_feature (961)..(961): n is a, c, g, or t
  misc_feature (965)..(965): n is a, c, g, or t
  misc_feature (976)..(977): n is a, c, g, or t
  misc_feature (979)..(980): n is a, c, g, or t
  misc_feature (983)..(983): n is a, c, g, or t
  misc_feature (991)..(991): n is a, c, g, or t
  misc_feature (993)..(993): n is a, c, g, or t
  misc_feature (995)..(995): n is a, c, g, or t
  misc_feature (1004)..(1006): n is a, c, g, or t
  misc_feature (1010)..(1010): n is a, c, g, or t
  misc_feature (1012)..(1013): n is a, c, g, or t
  misc_feature (1023)..(1023): n is a, c, g, or t
  misc_feature (1026)..(1027): n is a, c, g, or t
  misc_feature (1029)..(1029): n is a, c, g, or t
  misc_feature (1031)..(1031): n is a, c, g, or t
  misc_feature (1040)..(1041): n is a, c, g, or t
  misc_feature (1043)..(1045): n is a, c, g, or t
  misc_feature (1052)..(1052): n is a, c, g, or t
  misc_feature (1065)..(1065): n is a, c, g, or t
  misc_feature (1067)..(1067): n is a, c, g, or t
  misc_feature (1072)..(1073): n is a, c, g, or t
  misc_feature (1084)..(1084): n is a, c, g, or t
  misc_feature (1091)..(1091): n is a, c, g, or t
  misc_feature (1097)..(1097): n is a, c, g, or t
  misc_feature (1099)..(1101): n is a, c, g, or t
  misc_feature (1103)..(1103): n is a, c, g, or t
  misc_feature (1106)..(1106): n is a, c, g, or t
  misc_feature (1114)..(1114): n is a, c, g, or t
  misc_feature (1118)..(1118): n is a, c, g, or t
  misc_feature (1122)..(1122): n is a, c, g, or t
  misc_feature (1128)..(1131): n is a, c, g, or t
  misc_feature (1133)..(1133): n is a, c, g, or t
  misc_feature (1139)..(1140): n is a, c, g, or t
  misc_feature (1143)..(1143): n is a, c, g, or t
  misc_feature (1148)..(1148): n is a, c, g, or t
  misc_feature (1151)..(1153): n is a, c, g, or t
  misc_feature (1160)..(1160): n is a, c, g, or t
  misc_feature (1163)..(1163): n is a, c, g, or t
  misc_feature (1167)..(1167): n is a, c, g, or t
  misc_feature (1169)..(1169): n is a, c, g, or t
  misc_feature (1173)..(1175): n is a, c, g, or t
  misc_feature (1180)..(1180): n is a, c, g, or t
  misc_feature (1182)..(1183): n is a, c, g, or t
  misc_feature (1186)..(1186): n is a, c, g, or t
  misc_feature (1198)..(1198): n is a, c, g, or t
  misc_feature (1200)..(1203): n is a, c, g, or t
  misc_feature (1211)..(1211): n is a, c, g, or t
  misc_feature (1213)..(1213): n is a, c, g, or t
  misc_feature (1217)..(1217): n is a, c, g, or t
  misc_feature (1221)..(1222): n is a, c, g, or t
  misc_feature (1224)..(1225): n is a, c, g, or t
  misc_feature (1231)..(1233): n is a, c, g, or t
  misc_feature (1239)..(1239): n is a, c, g, or t
  misc_feature (1241)..(1241): n is a, c, g, or t
  misc_feature (1253)..(1253): n is a, c, g, or t
  misc_feature (1255)..(1255): n is a, c, g, or t
  misc_feature (1263)..(1264): n is a, c, g, or t
  misc_feature (1267)..(1267): n is a, c, g, or t
  misc_feature (1269)..(1271): n is a, c, g, or t
  misc_feature (1275)..(1275): n is a, c, g, or t
  misc_feature (1279)..(1279): n is a, c, g, or t
  misc_feature (1281)..(1281): n is a, c, g, or t
  misc_feature (1283)..(1284): n is a, c, g, or t
  misc_feature (1286)..(1286): n is a, c, g, or t
  misc_feature (1291)..(1292): n is a, c, g, or t
  misc_feature (1294)..(1294): n is a, c, g, or t
  misc_feature (1296)..(1296): n is a, c, g, or t
  misc_feature (1298)..(1298): n is a, c, g, or t
  misc_feature (1306)..(1306): n is a, c, g, or t
  misc_feature (1309)..(1310): n is a, c, g, or t
  misc_feature (1313)..(1313): n is a, c, g, or t
  misc_feature (1315)..(1315): n is a, c, g, or t
  misc_feature (1323)..(1325): n is a, c, g, or t
  misc_feature (1331)..(1332): n is a, c, g, or t
  misc_feature (1336)..(1336): n is a, c, g, or t
  misc_feature (1340)..(1340): n is a, c, g, or t
  misc_feature (1345)..(1345): n is a, c, g, or t
  misc_feature (1347)..(1347): n is a, c, g, or t
  misc_feature (1366)..(1366): n is a, c, g, or t
  misc_feature (1371)..(1371): n is a, c, g, or t
  misc_feature (1375)..(1375): n is a, c, g, or t
  misc_feature (1379)..(1384): n is a, c, g, or t
  misc_feature (1386)..(1386): n is a, c, g, or t
  misc_feature (1392)..(1392): n is a, c, g, or t
  misc_feature (1398)..(1398): n is a, c, g, or t
  misc_feature (1402)..(1403): n is a, c, g, or t
  misc_feature (1406)..(1406): n is a, c, g, or t
  misc_feature (1409)..(1409): n is a, c, g, or t
  misc_feature (1411)..(1412): n is a, c, g, or t
  misc_feature (1415)..(1415): n is a, c, g, or t
  misc_feature (1428)..(1428): n is a, c, g, or t
  misc_feature (1434)..(1434): n is a, c, g, or t
  misc_feature (1436)..(1439): n is a, c, g, or t
  misc_feature (1441)..(1442): n is a, c, g, or t
  misc_feature (1444)..(1444): n is a, c, g, or t
  misc_feature (1446)..(1446): n is a, c, g, or t
  misc_feature (1457)..(1457): n is a, c, g, or t
  misc_feature (1462)..(1462): n is a, c, g, or t
  misc_feature (1465)..(1465): n is a, c, g, or t
  misc_feature (1467)..(1468): n is a, c, g, or t
  misc_feature (1471)..(1471): n is a, c, g, or t
  misc_feature (1473)..(1473): n is a, c, g, or t
  misc_feature (1476)..(1476): n is a, c, g, or t
  misc_feature (1480)..(1480): n is a, c, g, or t
  misc_feature (1482)..(1482): n is a, c, g, or t
  misc_feature (1489)..(1489): n is a, c, g, or t
  misc_feature (1498)..(1498): n is a, c, g, or t
  misc_feature (1500)..(1501): n is a, c, g, or t
  misc_feature (1503)..(1504): n is a, c, g, or t
  misc_feature (1510)..(1510): n is a, c, g, or t
  misc_feature (1513)..(1513): n is a, c, g, or t
  misc_feature (1520)..(1520): n is a, c, g, or t
  misc_feature (1529)..(1529): n is a, c, g, or t
  misc_feature (1531)..(1531): n is a, c, g, or t
  misc_feature (1533)..(1533): n is a, c, g, or t
  misc_feature (1535)..(1535): n is a, c, g, or t
  misc_feature (1537)..(1537): n is a, c, g, or t
  misc_feature (1542)..(1542): n is a, c, g, or t
  misc_feature (1548)..(1548): n is a, c, g, or t
  misc_feature (1554)..(1554): n is a, c, g, or t
  misc_feature (1558)..(1558): n is a, c, g, or t
tgaatagagagaattactatgagaggatcgcatcaccatcaccatcacgggatcctatttaggtgacactatagaatcgtcgacccacgcgtccgcggacgcgtgggggagcatcccctgtccctgtgtgagcaggtggcccccatcattgacctcatggccgtcagcaatgcgctttttgccaagctccgggacttcatcaccctgcgtctgcctcctggcttcccagttaanattgaaatcccgatcttccacatcctcaacgcccgcatcaccttcgggaacctcancggntgcnacgaaccggtgccatcngtgcgaggcagccccagcagcgagacgccttccccaggcagcgactcctccagcgtcagcagctccagctccacgacctcctgccgcggctgcnanatcnccccagcgttgttcgaggccccncgcgnntacnnncatgangggctggcnancgggnggcngtanacccggnnnnacaaanannancctgctgcaattnnnanatctngaagagcctgcnnnannacgnttagagagtattnnccnnaanaaaaatnnnaggancgcnnntaaananaagttnannncnnaggaaataacnnctcatgntanntaaagaangttatcnatcanggactantcncnaatgtncanctngnganannaanannnaaccctnccnagaaaangntcatnttnntttncaaaanttananancatantcgntaaaacccataagaaagcnnatnancanncgnaaacccncntntntntcnaaananannnnnatnagnccatncactanttanccctttcanagttnnaannannaaangnantnnncttnnanncatttnccaactcngatnnataaanttatnnnantataaccaanaaantttnnaacnctnnnatatcgcataaaacaccanccacccanatnanaaanataatttttannanncanaatttctntnancaaaaaacnnnttananncttctttaanganncnanacttgattnnannngtaaaanatattcaacaaantnttttnnttcacctatanaaataantgtaanannnanaantataattnaaanatantgaatnnnnantcttcnncanctcanacnnntaaaaanctntaananctannncttanannctnctataaatatangnnnnatatgatntnaatnatcnnannacttannnattatnancatattagagtncnataaatannctnannnacanaaantntnncntgaanntnantnaataattntgnntanantcaactannnggaatnnatantttnttctnanaccaaataaattaaataanattcncgcncttnnnnnntnaatcanctattntaanntcnttngnnttnaattattaaatanctcttnannnnannantntcataaaatantccanttntnnctntnaantcanancagaatnatcattatnanntnngatatnatnttgttanatcttaatnangntnanccaanctctcnataatnttgnctt

SEQ ID NO: 112 - DNA, 1411 bp, Homo Sapiens
  misc_feature (6)..(10): n is a, c, g, or t
  misc_feature (12)..(13): n is a, c, g, or t
  misc_feature (189)..(189): n is a, c, g, or t
  misc_feature (279)..(279): n is a, c, g, or t
  misc_feature (292)..(292): n is a, c, g, or t
  misc_feature (295)..(295): n is a, c, g, or t
  misc_feature (317)..(317): n is a, c, g, or t
  misc_feature (335)..(335): n is a, c, g, or t
  misc_feature (341)..(343): n is a, c, g, or t
  misc_feature (346)..(346): n is a, c, g, or t
  misc_feature (348)..(348): n is a, c, g, or t
  misc_feature (350)..(350): n is a, c, g, or t
  misc_feature (352)..(352): n is a, c, g, or t
  misc_feature (361)..(361): n is a, c, g, or t
  misc_feature (370)..(370): n is a, c, g, or t
  misc_feature (372)..(372): n is a, c, g, or t
  misc_feature (374)..(374): n is a, c, g, or t
  misc_feature (380)..(380): n is a, c, g, or t
  misc_feature (386)..(387): n is a, c, g, or t
  misc_feature (390)..(390): n is a, c, g, or t
  misc_feature (404)..(404): n is a, c, g, or t
  misc_feature (406)..(406): n is a, c, g, or t
  misc_feature (409)..(409): n is a, c, g, or t
  misc_feature (420)..(420): n is a, c, g, or t
  misc_feature (424)..(425): n is a, c, g, or t
  misc_feature (429)..(429): n is a, c, g, or t
  misc_feature (433)..(433): n is a, c, g, or t
  misc_feature (436)..(436): n is a, c, g, or t
  misc_feature (442)..(443): n is a, c, g, or t
  misc_feature (451)..(451): n is a, c, g, or t
  misc_feature (457)..(457): n is a, c, g, or t
  misc_feature (461)..(461): n is a, c, g, or t
  misc_feature (475)..(475): n is a, c, g, or t
  misc_feature (477)..(477): n is a, c, g, or t
  misc_feature (483)..(483): n is a, c, g, or t
  misc_feature (488)..(488): n is a, c, g, or t
  misc_feature (490)..(491): n is a, c, g, or t
  misc_feature (494)..(494): n is a, c, g, or t
  misc_feature (498)..(499): n is a, c, g, or t
  misc_feature (502)..(502): n is a, c, g, or t
  misc_feature (505)..(505): n is a, c, g, or t
  misc_feature (511)..(511): n is a, c, g, or t
  misc_feature (513)..(513): n is a, c, g, or t
  misc_feature (535)..(535): n is a, c, g, or t
  misc_feature (554)..(554): n is a, c, g, or t
  misc_feature (556)..(556): n is a, c, g, or t
  misc_feature (558)..(558): n is a, c, g, or t
  misc_feature (567)..(567): n is a, c, g, or t
  misc_feature (580)..(580): n is a, c, g, or t
  misc_feature (584)..(585): n is a, c, g, or t
  misc_feature (589)..(590): n is a, c, g, or t
  misc_feature (592)..(592): n is a, c, g, or t
  misc_feature (594)..(594): n is a, c, g, or t
  misc_feature (607)..(607): n is a, c, g, or t
  misc_feature (618)..(618): n is a, c, g, or t
  misc_feature (621)..(621): n is a, c, g, or t
  misc_feature (631)..(631): n is a, c, g, or t
  misc_feature (635)..(635): n is a, c, g, or t
  misc_feature (637)..(637): n is a, c, g, or t
  misc_feature (641)..(641): n is a, c, g, or t
  misc_feature (643)..(643): n is a, c, g, or t
  misc_feature (646)..(646): n is a, c, g, or t
  misc_feature (659)..(662): n is a, c, g, or t
  misc_feature (665)..(665): n is a, c, g, or t
  misc_feature (669)..(670): n is a, c, g, or t
  misc_feature (676)..(676): n is a, c, g, or t
  misc_feature (688)..(688): n is a, c, g, or t
  misc_feature (690)..(690): n is a, c, g, or t
  misc_feature (694)..(694): n is a, c, g, or t
  misc_feature (696)..(696): n is a, c, g, or t
  misc_feature (701)..(701): n is a, c, g, or t
  misc_feature (708)..(708): n is a, c, g, or t
  misc_feature (711)..(711): n is a, c, g, or t
  misc_feature (714)..(714): n is a, c, g, or t
  misc_feature (716)..(716): n is a, c, g, or t
  misc_feature (719)..(722): n is a, c, g, or t
  misc_feature (724)..(725): n is a, c, g, or t
  misc_feature (728)..(728): n is a, c, g, or t
  misc_feature (731)..(733): n is a, c, g, or t
  misc_feature (735)..(739): n is a, c, g, or t
  misc_feature (743)..(744): n is a, c, g, or t
  misc_feature (747)..(747): n is a, c, g, or t
  misc_feature (750)..(750): n is a, c, g, or t
  misc_feature (753)..(753): n is a, c, g, or t
  misc_feature (756)..(756): n is a, c, g, or t
  misc_feature (758)..(758): n is a, c, g, or t
  misc_feature (760)..(760): n is a, c, g, or t
  misc_feature (762)..(764): n is a, c, g, or t
  misc_feature (769)..(770): n is a, c, g, or t
  misc_feature (772)..(772): n is a, c, g, or t
  misc_feature (774)..(775): n is a, c, g, or t
  misc_feature (777)..(777): n is a, c, g, or t
  misc_feature (782)..(782): n is a, c, g, or t
  misc_feature (784)..(784): n is a, c, g, or t
  misc_feature (787)..(787): n is a, c, g, or t
  misc_feature (791)..(791): n is a, c, g, or t
  misc_feature (795)..(796): n is a, c, g, or t
  misc_feature (799)..(799): n is a, c, g, or t
  misc_feature (802)..(802): n is a, c, g, or t
  misc_feature (804)..(805): n is a, c, g, or t
  misc_feature (809)..(810): n is a, c, g, or t
  misc_feature (814)..(815): n is a, c, g, or t
  misc_feature (817)..(817): n is a, c, g, or t
  misc_feature (821)..(822): n is a, c, g, or t
  misc_feature (828)..(832): n is a, c, g, or t
  misc_feature (834)..(834): n is a, c, g, or t
  misc_feature (837)..(837): n is a, c, g, or t
  misc_feature (843)..(844): n is a, c, g, or t
  misc_feature (846)..(846): n is a, c, g, or t
  misc_feature (850)..(852): n is a, c, g, or t
  misc_feature (855)..(856): n is a, c, g, or t
  misc_feature (858)..(859): n is a, c, g, or t
  misc_feature (861)..(861): n is a, c, g, or t
  misc_feature (863)..(864): n is a, c, g, or t
  misc_feature (866)..(866): n is a, c, g, or t
  misc_feature (868)..(869): n is a, c, g, or t
  misc_feature (871)..(871): n is a, c, g, or t
  misc_feature (873)..(873): n is a, c, g, or t
  misc_feature (875)..(875): n is a, c, g, or t
  misc_feature (878)..(881): n is a, c, g, or t
  misc_feature (883)..(883): n is a, c, g, or t
  misc_feature (887)..(889): n is a, c, g, or t
  misc_feature (892)..(892): n is a, c, g, or t
  misc_feature (894)..(894): n is a, c, g, or t
  misc_feature (897)..(901): n is a, c, g, or t
  misc_feature (903)..(904): n is a, c, g, or t
  misc_feature (913)..(914): n is a, c, g, or t
  misc_feature (916)..(917): n is a, c, g, or t
  misc_feature (920)..(920): n is a, c, g, or t
  misc_feature (927)..(927): n is a, c, g, or t
  misc_feature (929)..(929): n is a, c, g, or t
  misc_feature (932)..(937): n is a, c, g, or t
  misc_feature (939)..(939): n is a, c, g, or t
  misc_feature (943)..(946): n is a, c, g, or t
  misc_feature (948)..(948): n is a, c, g, or t
  misc_feature (951)..(952): n is a, c, g, or t
  misc_feature (954)..(954): n is a, c, g, or t
  misc_feature (957)..(958): n is a, c, g, or t
  misc_feature (967)..(967): n is a, c, g, or t
  misc_feature (969)..(969): n is a, c, g, or t
  misc_feature (976)..(976): n is a, c, g, or t
  misc_feature (979)..(979): n is a, c, g, or t
  misc_feature (981)..(981): n is a, c, g, or t
  misc_feature (987)..(987): n is a, c, g, or t
  misc_feature (989)..(989): n is a, c, g, or t
  misc_feature (996)..(996): n is a, c, g, or t
  misc_feature (999)..(999): n is a, c, g, or t
  misc_feature (1002)..(1003): n is a, c, g, or t
  misc_feature (1005)..(1006): n is a, c, g, or t
  misc_feature (1009)..(1015): n is a, c, g, or t
  misc_feature (1018)..(1020): n is a, c, g, or t
  misc_feature (1022)..(1022): n is a, c, g, or t
  misc_feature (1024)..(1024): n is a, c, g, or t
  misc_feature (1026)..(1026): n is a, c, g, or t
  misc_feature (1029)..(1029): n is a, c, g, or t
  misc_feature (1033)..(1035): n is a, c, g, or t
  misc_feature (1038)..(1039): n is a, c, g, or t
  misc_feature (1042)..(1042): n is a, c, g, or t
  misc_feature (1048)..(1048): n is a, c, g, or t
  misc_feature (1050)..(1050): n is a, c, g, or t
  misc_feature (1052)..(1052): n is a, c, g, or t
  misc_feature (1056)..(1057): n is a, c, g, or t
  misc_feature (1062)..(1062): n is a, c, g, or t
  misc_feature (1064)..(1068): n is a, c, g, or t
  misc_feature (1071)..(1074): n is a, c, g, or t
  misc_feature (1077)..(1080): n is a, c, g, or t
  misc_feature (1092)..(1092): n is a, c, g, or t
  misc_feature (1095)..(1095): n is a, c, g, or t
  misc_feature (1103)..(1105): n is a, c, g, or t
  misc_feature (1107)..(1112): n is a, c, g, or t
  misc_feature (1114)..(1114): n is a, c, g, or t
  misc_feature (1119)..(1123): n is a, c, g, or t
  misc_feature (1125)..(1126): n is a, c, g, or t
  misc_feature (1129)..(1129): n is a, c, g, or t
  misc_feature (1131)..(1131): n is a, c, g, or t
  misc_feature (1133)..(1133): n is a, c, g, or t
  misc_feature (1135)..(1135): n is a, c, g, or t
  misc_feature (1137)..(1137): n is a, c, g, or t
  misc_feature (1141)..(1141): n is a, c, g, or t
  misc_feature (1143)..(1146): n is a, c, g, or t
  misc_feature (1150)..(1150): n is a, c, g, or t
  misc_feature (1152)..(1152): n is a, c, g, or t
  misc_feature (1156)..(1157): n is a, c, g, or t
  misc_feature (1159)..(1162): n is a, c, g, or t
  misc_feature (1171)..(1174): n is a, c, g, or t
  misc_feature (1178)..(1182): n is a, c, g, or t
  misc_feature (1184)..(1184): n is a, c, g, or t
  misc_feature (1188)..(1188): n is a, c, g, or t
  misc_feature (1190)..(1190): n is a, c, g, or t
  misc_feature (1192)..(1193): n is a, c, g, or t
  misc_feature (1196)..(1198): n is a, c, g, or t
  misc_feature (1200)..(1201): n is a, c, g, or t
  misc_feature (1205)..(1207): n is a, c, g, or t
  misc_feature (1209)..(1209): n is a, c, g, or t
  misc_feature (1215)..(1215): n is a, c, g, or t
  misc_feature (1218)..(1221): n is a, c, g, or t
  misc_feature (1223)..(1224): n is a, c, g, or t
  misc_feature (1228)..(1232): n is a, c, g, or t
  misc_feature (1234)..(1234): n is a, c, g, or t
  misc_feature (1236)..(1238): n is a, c, g, or t
  misc_feature (1240)..(1240): n is a, c, g, or t
  misc_feature (1242)..(1242): n is a, c, g, or t
  misc_feature (1247)..(1255): n is a, c, g, or t
  misc_feature (1260)..(1260): n is a, c, g, or t
  misc_feature (1262)..(1264): n is a, c, g, or t
  misc_feature (1266)..(1269): n is a, c, g, or t
  misc_feature (1271)..(1272): n is a, c, g, or t
  misc_feature (1274)..(1274): n is a, c, g, or t
  misc_feature (1276)..(1276): n is a, c, g, or t
  misc_feature (1278)..(1278): n is a, c, g, or t
  misc_feature (1281)..(1281): n is a, c, g, or t
  misc_feature (1283)..(1285): n is a, c, g, or t
  misc_feature (1287)..(1287): n is a, c, g, or t
  misc_feature (1290)..(1290): n is a, c, g, or t
  misc_feature (1292)..(1296): n is a, c, g, or t
  misc_feature (1298)..(1299): n is a, c, g, or t
  misc_feature (1301)..(1303): n is a, c, g, or t
  misc_feature (1305)..(1305): n is a, c, g, or t
  misc_feature (1307)..(1308): n is a, c, g, or t
  misc_feature (1310)..(1313): n is a, c, g, or t
  misc_feature (1317)..(1321): n is a, c, g, or t
  misc_feature (1323)..(1332): n is a, c, g, or t
  misc_feature (1334)..(1335): n is a, c, g, or t
  misc_feature (1337)..(1338): n is a, c, g, or t
  misc_feature (1341)..(1341): n is a, c, g, or t
  misc_feature (1343)..(1344): n is a, c, g, or t
  misc_feature (1346)..(1346): n is a, c, g, or t
  misc_feature (1348)..(1352): n is a, c, g, or t
  misc_feature (1355)..(1357): n is a, c, g, or t
  misc_feature (1360)..(1361): n is a, c, g, or t
  misc_feature (1363)..(1371): n is a, c, g, or t
  misc_feature (1373)..(1373): n is a, c, g, or t
  misc_feature (1376)..(1377): n is a, c, g, or t
  misc_feature (1380)..(1380): n is a, c, g, or t
  misc_feature (1382)..(1395): n is a, c, g, or t
  misc_feature (1399)..(1400): n is a, c, g, or t
  misc_feature (1402)..(1404): n is a, c, g, or t
  misc_feature (1406)..(1406): n is a, c, g, or t
  misc_feature (1408)..(1411): n is a, c, g, or t
cgcccnnnnnannagagaaattactatgagaggatcgcatcaccatcaccatcacgggatcctatttaggtgacactatagaatcgtcgacccacgcgtccggacgttaggaaaccaaaggagctttcagcctgcggccagaagaagcagcgcctcggggagcagagggagcgctcggcgagtccgcanagggccgcgcggccgaggctcgaggaggcgcccggcggccaggggcggcccgaggccggcaggcccgcctcggaggccagggcgcccggnctcgcggcggcanacncggcggacgcggcgcgggcggncgggaaggaggctccccntgcggnnncgntntntnagctctgcnggagcaaangncngggggntgctcnnttntttgccggcccggncntanaattcatcggntganntttncgangantgcatnncgggtgancaacgngacntcacctgacgaacncnaatccncctgntnncgnctcnnagnacnacgaancnctccccaccatatttttaaacntcatctcattttatatgangntnctgtcatanaatcctaacctgnctcnntgtnnantngtctaaccttatntttttaagtanccnctgtttgtgntacnanattntnaancctatttttctcnnnntantatnnattttntctcctaaacantntatnanttttntataaanttnaananatnnnnannttnttnnncnnnnnatannatnttnaanatntntntnnnattcnnanannanacttntnttnaatnactnntanaantnnatcnntttnnantccnntttttnnnnntnttntttccnntncttnnncannanntnanntntnnantnanttnnnntnattnnntananttnnnnnanntttttaaanncnnatntaatttntnaannnnnntnattnnnntnaannanttnnttttttctnantctttanaantntctcancnatatttnctnttnntnntannnnnnnaannntntntnttntttnnntanntanatttcncntntttnnttacntnnnnntannnnttnnnntaaaatttttanatnttttttannntnnnnnnantttannnnntnnaantnanantntttntnnnntttntnaatnnannnnttttttttnnnnattnnnnntntaantnannaannntnnattnnntnattttnttnnnntnntatnnnnntnannntntnttatnnnnnnnnnttttntnnncnnnnannantnantanannnanatnannnnntnnannnantnnannnnatannnnntnnnnnnnnnntnntnntantnntntnnnnntannnatnnannnnnnnnnantannttntnnnnnnnnnnnnnnttanntnnntnannnn

SEQ ID NO: 113 - DNA, 256 bp, Homo Sapiens
  misc_feature (19)..(19): n is a, c, g, or t
  misc_feature (39)..(39): n is a, c, g, or t
  misc_feature (249)..(251): n is a, c, g, or t
ttatttaagaggagaaatnactctgagaggatcgatacntcacatcacggatcctatttaggtgacactatagaatcgtcgacccacgcgtccgcccacgcgtccgcccacgcgtccggttttgtggaaaccttggacagccccaccatggaggcctacgtgactgagaccgctgaggaggtgctactggtgcggaatctgaactcggatgatcaggctgttgtgctgaaggccctgagattggcgccnnnggggc

SEQ ID NO: 114 - DNA, 1223 bp, Homo Sapiens
  misc_feature (875)..(875): n is a, c, g, or t
  misc_feature (904)..(904): n is a, c, g, or t
  misc_feature (907)..(907): n is a, c, g, or t
  misc_feature (947)..(947): n is a, c, g, or t
  misc_feature (968)..(968): n is a, c, g, or t
  misc_feature (971)..(971): n is a, c, g, or t
  misc_feature (983)..(983): n is a, c, g, or t
  misc_feature (994)..(994): n is a, c, g, or t
  misc_feature (1013)..(1013): n is a, c, g, or t
  misc_feature (1015)..(1015): n is a, c, g, or t
  misc_feature (1020)..(1020): n is a, c, g, or t
  misc_feature (1027)..(1027): n is a, c, g, or t
  misc_feature (1029)..(1029): n is a, c, g, or t
  misc_feature (1041)..(1041): n is a, c, g, or t
  misc_feature (1064)..(1064): n is a, c, g, or t
  misc_feature (1079)..(1079): n is a, c, g, or t
  misc_feature (1081)..(1081): n is a, c, g, or t
  misc_feature (1089)..(1089): n is a, c, g, or t
  misc_feature (1103)..(1103): n is a, c, g, or t
  misc_feature (1112)..(1112): n is a, c, g, or t
  misc_feature (1117)..(1117): n is a, c, g, or t
  misc_feature (1120)..(1120): n is a, c, g, or t
  misc_feature (1125)..(1125): n is a, c, g, or t
  misc_feature (1130)..(1130): n is a, c, g, or t
  misc_feature (1135)..(1135): n is a, c, g, or t
  misc_feature (1137)..(1137): n is a, c, g, or t
  misc_feature (1144)..(1145): n is a, c, g, or t
  misc_feature (1150)..(1152): n is a, c, g, or t
  misc_feature (1154)..(1154): n is a, c, g, or t
  misc_feature (1164)..(1164): n is a, c, g, or t
  misc_feature (1168)..(1168): n is a, c, g, or t
  misc_feature (1170)..(1170): n is a, c, g, or t
  misc_feature (1176)..(1176): n is a, c, g, or t
  misc_feature (1188)..(1188): n is a, c, g, or t
  misc_feature (1208)..(1208): n is a, c, g, or t
  misc_feature (1214)..(1214): n is a, c, g, or t
  misc_feature (1220)..(1220): n is a, c, g, or t
tagagaaattactatgagaggatcgcatcaccatcaccatcacggatcctatttaggtgacactatagaatcgtcgacccacgcgtccgtcttgctagattctcaggggctgctagattcatccctgatggcatcaggcactgccagccgctcagaggatgaggagtcactggcagggcagaagcgagcctcctcccaggccttgggcaccatccctaaacggagaagctcctccaggttcatcaagaggaagaagttcgatgatgagctggtggagagcagcctggcaaaatcttctacccgggcaaagggggccagtggggtggaaccagggcgctgttcggggagtgaaccctcctccagtgagaagaagaaggtatccaaagcccccagcactcctgtgccacccagcccagccccagcccctggactcaccaagcgtgtgaagaagagtaaacagccacttcaggtgaccaaggatctgggccgctggaagcctgcagatgacctcctgctcataaatgctgtgttgcagaccaacgacctgacctccgtccacctgggcgtgaaattcagctgccgcttcacccttcgggaggtccaggagcgttggtacgccctgctctacgatcctgtcatctccaagttggcctgtcaggccatgaggcagctgcacccagaggctattgcagccatccagagcaaggccctgtttagcaaggctgaggagcagctgctgagcaaagtgggatcgaccagccagcccaccttggagaccttccaggacctgctgcacagacaccctgatgccttctacctggcccgtaccgcgaaggccctgcaggcccactggcagctcatgaagcagtattacntgctggaggaaccagacagccgctgcccnaangggaccaagtgctgaacttctctgatgcaaagaactgatngatgacagtaactcaaggacntgngaaatgaggtcntggaacatganctgatgtggctgaacggcncnaaaancgaaaantncggcactggaanaaggaactgcttaatggcagggnttatggaagctttcnanggattaanttttcggaattcanaacaaactngcatnttncgggnccccnggggngnacctganngcccnnngngaaaatcccngggnanacaccnggatacccaatngtttggacttttttggaggnccggcntgaaanttc

SEQ ID NO: 115 - DNA, 256 bp, Homo Sapiens
agcagctcaaagccaagcaacgcaaggaccctcggttctgtgccttcgtgcaggaagctgagagccgcccgcggtgccgccgcctgcagctgaaggacatgatccccacggagatgcagcggctgaccaagtaccccctgctcctgcagagcatcgggcagaacacagaagagcccacagaacgggagaaagtggagctggcagccgagtgctgccgggaaattctacaccacgtcaaccaagccgtgcgtgacat

SEQ ID NO: 116 - DNA, 1382 bp, Homo Sapiens
  misc_feature (7)..(7): n is a, c, g, or t
  misc_feature (796)..(796): n is a, c, g, or t
  misc_feature (803)..(803): n is a, c, g, or t
  misc_feature (931)..(931): n is a, c, g, or t
  misc_feature (949)..(949): n is a, c, g, or t
  misc_feature (958)..(958): n is a, c, g, or t
  misc_feature (964)..(964): n is a, c, g, or t
  misc_feature (969)..(969): n is a, c, g, or t
  misc_feature (974)..(974): n is a, c, g, or t
  misc_feature (981)..(981): n is a, c, g, or t
  misc_feature (984)..(984): n is a, c, g, or t
  misc_feature (994)..(994): n is a, c, g, or t
  misc_feature (1000)..(1000): n is a, c, g, or t
  misc_feature (1004)..(1004): n is a, c, g, or t
  misc_feature (1019)..(1019): n is a, c, g, or t
  misc_feature (1023)..(1024): n is a, c, g, or t
  misc_feature (1040)..(1040): n is a, c, g, or t
  misc_feature (1048)..(1048): n is a, c, g, or t
  misc_feature (1069)..(1070): n is a, c, g, or t
  misc_feature (1080)..(1080): n is a, c, g, or t
  misc_feature (1086)..(1086): n is a, c, g, or t
  misc_feature (1089)..(1089): n is a, c, g, or t
  misc_feature (1103)..(1104): n is a, c, g, or t
  misc_feature (1112)..(1112): n is a, c, g, or t
  misc_feature (1120)..(1121): n is a, c, g, or t
  misc_feature (1123)..(1123): n is a, c, g, or t
  misc_feature (1126)..(1126): n is a, c, g, or t
  misc_feature (1130)..(1130): n is a, c, g, or t
  misc_feature (1143)..(1143): n is a, c, g, or t
  misc_feature (1146)..(1146): n is a, c, g, or t
  misc_feature (1151)..(1151): n is a, c, g, or t
  misc_feature (1156)..(1156): n is a, c, g, or t
  misc_feature (1162)..(1163): n is a, c, g, or t
  misc_feature (1168)..(1168): n is a, c, g, or t
  misc_feature (1176)..(1176): n is a, c, g, or t
  misc_feature (1181)..(1181): n is a, c, g, or t
  misc_feature (1184)..(1184): n is a, c, g, or t
  misc_feature (1192)..(1192): n is a, c, g, or t
  misc_feature (1200)..(1200): n is a, c, g, or t
  misc_feature (1202)..(1202): n is a, c, g, or t
  misc_feature (1211)..(1211): n is a, c, g, or t
  misc_feature (1213)..(1213): n is a, c, g, or t
  misc_feature (1217)..(1217): n is a, c, g, or t
  misc_feature (1219)..(1219): n is a, c, g, or t
  misc_feature (1222)..(1222): n is a, c, g, or t
  misc_feature (1225)..(1226): n is a, c, g, or t
  misc_feature (1234)..(1234): n is a, c, g, or t
  misc_feature (1256)..(1256): n is a, c, g, or t
  misc_feature (1258)..(1260): n is a, c, g, or t
  misc_feature (1263)..(1263): n is a, c, g, or t
  misc_feature (1266)..(1267): n is a, c, g, or t
  misc_feature (1282)..(1282): n is a, c, g, or t
  misc_feature (1286)..(1287): n is a, c, g, or t
  misc_feature (1308)..(1308): n is a, c, g, or t
  misc_feature (1311)..(1311): n is a, c, g, or t
  misc_feature (1313)..(1314): n is a, c, g, or t
  misc_feature (1316)..(1316): n is a, c, g, or t
  misc_feature (1322)..(1322): n is a, c, g, or t
  misc_feature (1326)..(1326): n is a, c, g, or t
  misc_feature (1332)..(1332): n is a, c, g, or t
  misc_feature (1334)..(1334): n is a, c, g, or t
  misc_feature (1338)..(1338): n is a, c, g, or t
  misc_feature (1348)..(1350): n is a, c, g, or t
  misc_feature (1358)..(1358): n is a, c, g, or t
  misc_feature (1363)..(1363): n is a, c, g, or t
  misc_feature (1374)..(1374): n is a, c, g, or t
  misc_feature (1380)..(1380): n is a, c, g, or t
tagaggnaattactatggagaggatcgcatcaccatcaccatcacgggatcctatttaggtgacactatagaatcgtcgacccacgcgtccgctcttactgaacataagataattcatactggagagaaaccctacaaatgtgaagaatgtggcaaagcatttagccaatcctcaaccctaactagacatacgaggatgcacactggagagaaaccatacaaatgtgaagaatgtggcaaagcttttaatcgatcctcaaagcttactacacataagataattcatactggagagaaaccttacaagtgtgaagaatgtggcaaagcatttatatcatcctcaaccctaaatggacataagagaattcatactagagagaaaccctacaaatgtgaagaatgtggcaaagcatttagccaatcttcaaccctaactagacataagaggttgcacaccggagagaaaccctacaaatgtggagaatgtggcaaagcctttaaagagtcctcagctcttactaaacataagataattcacactggagagaaaccctacaaatgtgaaaaatgtggcaaagcctttaaccagtcttcaatccttactaaccataagaaaattcatactatcacacctgtaatcccagcactttgggaggccgaggcgggcggatcacgaggtcaggagatggagaccatcctggctaacacagtgaaaccccttctctactaaaaaatacaaaaaattagccgggcgtggtggcgggcgcctgtagtcccagctatgcgagaggctgangcagganaatggcgtgaacccgggaggcggagcttgcagtgagccgagatcacgccactgcactcaagcctgggcgacagagcgagactccgtctcaaaaaaaaaaaaaagaaaattcctactagagagaacccntacaaatataaagaatgnggcaaatcnttttancgggncttcnacctttnctnaacataaggnaattcntacnggaattaaactctanaatnnggaaaaagggggcaancctttttncgggccccccccctacccganntaaaaaaatncttccnggncagcaccctacaanngggaaaanttggcaanncnttnaccngttttcccccttnctncgaanaaaanaccccnntgggnaaaaaacnttaanggngggaaaangggggaangncttaaaaancnggantnttnaannaaataaantttttctttggggggaaaaccncnnnccnggnnaggggcccccctttnaaannaaattttttaaacaaaaaaanggngnngnaacccnaaanggggangnggcnccccccgggnnncccttttnggggnaaatttcgggnaaaccngg

SEQ ID NO: 117 - DNA, 1200 bp, Homo Sapiens
  misc_feature (795)..(795): n is a, c, g, or t
  misc_feature (848)..(848): n is a, c, g, or t
  misc_feature (864)..(864): n is a, c, g, or t
  misc_feature (890)..(890): n is a, c, g, or t
  misc_feature (896)..(896): n is a, c, g, or t
  misc_feature (909)..(909): n is a, c, g, or t
  misc_feature (953)..(953): n is a, c, g, or t
  misc_feature (971)..(971): n is a, c, g, or t
  misc_feature (973)..(973): n is a, c, g, or t
  misc_feature (976)..(976): n is a, c, g, or t
  misc_feature (984)..(984): n is a, c, g, or t
  misc_feature (996)..(996): n is a, c, g, or t
  misc_feature (1003)..(1003): n is a, c, g, or t
  misc_feature (1015)..(1015): n is a, c, g, or t
  misc_feature (1023)..(1023): n is a, c, g, or t
  misc_feature (1025)..(1025): n is a, c, g, or t
  misc_feature (1041)..(1041): n is a, c, g, or t
  misc_feature (1048)..(1048): n is a, c, g, or t
  misc_feature (1053)..(1053): n is a, c, g, or t
  misc_feature (1059)..(1059): n is a, c, g, or t
  misc_feature (1069)..(1070): n is a, c, g, or t
  misc_feature (1079)..(1080): n is a, c, g, or t
  misc_feature (1087)..(1087): n is a, c, g, or t
  misc_feature (1090)..(1090): n is a, c, g, or t
  misc_feature (1093)..(1093): n is a, c, g, or t
  misc_feature (1097)..(1097): n is a, c, g, or t
  misc_feature (1099)..(1099): n is a, c, g, or t
  misc_feature (1102)..(1102): n is a, c, g, or t
  misc_feature (1105)..(1105): n is a, c, g, or t
  misc_feature (1110)..(1110): n is a, c, g, or t
  misc_feature (1112)..(1112): n is a, c, g, or t
  misc_feature (1119)..(1119): n is a, c, g, or t
  misc_feature (1125)..(1125): n is a, c, g, or t
  misc_feature (1135)..(1135): n is a, c, g, or t
  misc_feature (1138)..(1138): n is a, c, g, or t
  misc_feature (1142)..(1143): n is a, c, g, or t
  misc_feature (1149)..(1149): n is a, c, g, or t
  misc_feature (1160)..(1160): n is a, c, g, or t
  misc_feature (1164)..(1166): n is a, c, g, or t
  misc_feature (1170)..(1170): n is a, c, g, or t
  misc_feature (1179)..(1180): n is a, c, g, or t
  misc_feature (1182)..(1182): n is a, c, g, or t
  misc_feature (1186)..(1186): n is a, c, g, or t
  misc_feature (1191)..(1191): n is a, c, g, or t
tagagaaattactatgagaggatcgcatcaccatcaccatcacggatcctatttaggtgacactatagaatcgtcgacccacgcgtccggcggatcagcgtctactacaacgaggcctcttctcacaagtacgtgcctcgagccattctggtggacctggaacccggaaccatggacagtgtccgctcaggggcctttggacatctcttcaggcctgacaatttcatctttggtcagagtggggccggcaacaactgggccaagggtcactacacggagggggcggagctggtggattcggtcctggatgtggtgcggaaggagtgtgaaaactgcgactgcctgcagggcttccagctgacccactcgctggggggcggcacgggctccggcatgggcacgttgctcatcagcaaggtgcgtgaggagtatcccgaccgcatcatgaacaccttcagcgtcgtgccctcacccaaggtgtcagacacggtggtggagccctacaacgccacgctgtccatccaccagctggtggagaacacggatgagacctactgcatcgacaacgaggcgctctacgacatctgcttccgcaccctcaagctggccacgcccacctacggggacctcaaccacctggtatcggccaccatgagcggagtcaccacctccttgcgcttcccgggccagctcaacgctgacctgcgcaagctggccgtcaacatggtgcccttcccgcgcctgcacttcttcatgcccggcttcgcccccctcacagcccggggcagccagcantaccgggccctgaccgtgcccgaactcacccagcaaatgttcgatgccaaaanatgatggccgcctgcnaaccgcgccacgggccgctacctganggtggnccaccgtgttccngggccccatgtccatgaaaggaagtggaaaaaacaaatgctggnccatccaaaacaaaaaanancanctacttcntggaaatggatnccccaanaacgtgaaaggnggccctgngngaaaatcccccccccngggcctnaaaangtcccncccctttatnnggaaaaaanngggccanccnagnaaantnttnaancccantncccaaanaatttnaagggccatnttncggnncaaagncctttcttgcnttgnnnaacnggcaaaggnntngaanaaaantgaaatttc

SEQ ID NO: 118 - DNA, 1407 bp, Homo Sapiens
  misc_feature (2)..(2): n is a, c, g, or t
  misc_feature (929)..(929): n is a, c, g, or t
  misc_feature (941)..(941): n is a, c, g, or t
  misc_feature (954)..(954): n is a, c, g, or t
  misc_feature (959)..(959): n is a, c, g, or t
  misc_feature (964)..(964): n is a, c, g, or t
  misc_feature (966)..(966): n is a, c, g, or t
  misc_feature (968)..(968): n is a, c, g, or t
  misc_feature (971)..(971): n is a, c, g, or t
  misc_feature (987)..(987): n is a, c, g, or t
  misc_feature (1002)..(1002): n is a, c, g, or t
  misc_feature (1024)..(1024): n is a, c, g, or t
  misc_feature (1026)..(1028): n is a, c, g, or t
  misc_feature (1050)..(1050): n is a, c, g, or t
  misc_feature (1054)..(1054): n is a, c, g, or t
  misc_feature (1058)..(1058): n is a, c, g, or t
  misc_feature (1060)..(1060): n is a, c, g, or t
  misc_feature (1074)..(1074): n is a, c, g, or t
  misc_feature (1085)..(1085): n is a, c, g, or t
  misc_feature (1096)..(1096): n is a, c, g, or t
  misc_feature (1101)..(1101): n is a, c, g, or t
  misc_feature (1110)..(1110): n is a, c, g, or t
  misc_feature (1113)..(1113): n is a, c, g, or t
  misc_feature (1116)..(1116): n is a, c, g, or t
  misc_feature (1120)..(1120): n is a, c, g, or t
  misc_feature (1125)..(1125): n is a, c, g, or t
  misc_feature (1128)..(1129): n is a, c, g, or t
  misc_feature (1131)..(1131): n is a, c, g, or t
  misc_feature (1136)..(1136): n is a, c, g, or t
  misc_feature (1142)..(1142): n is a, c, g, or t
  misc_feature (1144)..(1144): n is a, c, g, or t
  misc_feature (1148)..(1148): n is a, c, g, or t
  misc_feature (1155)..(1156): n is a, c, g, or t
  misc_feature (1158)..(1158): n is a, c, g, or t
  misc_feature (1163)..(1163): n is a, c, g, or t
  misc_feature (1166)..(1166): n is a, c, g, or t
  misc_feature (1170)..(1170): n is a, c, g, or t
  misc_feature (1173)..(1173): n is a, c, g, or t
  misc_feature (1179)..(1179): n is a, c, g, or t
  misc_feature (1181)..(1182): n is a, c, g, or t
  misc_feature (1187)..(1187): n is a, c, g, or t
  misc_feature (1194)..(1194): n is a, c, g, or t
  misc_feature (1196)..(1196): n is a, c, g, or t
  misc_feature (1200)..(1200): n is a, c, g, or t
  misc_feature (1205)..(1205): n is a, c, g, or t
  misc_feature (1218)..(1219): n is a, c, g, or t
  misc_feature (1221)..(1221): n is a, c, g, or t
  misc_feature (1224)..(1224): n is a, c, g, or t
  misc_feature (1233)..(1233): n is a, c, g, or t
  misc_feature (1237)..(1238): n is a, c, g, or t
  misc_feature (1242)..(1242): n is a, c, g, or t
  misc_feature (1247)..(1247): n is a, c, g, or t
  misc_feature (1249)..(1251): n is a, c, g, or t
  misc_feature (1255)..(1255): n is a, c, g, or t
  misc_feature (1257)..(1257): n is a, c, g, or t
  misc_feature (1259)..(1260): n is a, c, g, or t
  misc_feature (1262)..(1262): n is a, c, g, or t
  misc_feature (1267)..(1267): n is a, c, g, or t
  misc_feature (1272)..(1274): n is a, c, g, or t
  misc_feature (1277)..(1277): n is a, c, g, or t
  misc_feature (1279)..(1279): n is a, c, g, or t
  misc_feature (1281)..(1281): n is a, c, g, or t
  misc_feature (1283)..(1283): n is a, c, g, or t
  misc_feature (1285)..(1285): n is a, c, g, or t
  misc_feature (1288)..(1290): n is a, c, g, or t
  misc_feature (1292)..(1292): n is a, c, g, or t
  misc_feature (1297)..(1297): n is a, c, g, or t
  misc_feature (1303)..(1303): n is a, c, g, or t
  misc_feature (1306)..(1313): n is a, c, g, or t
  misc_feature (1316)..(1317): n is a, c, g, or t
  misc_feature (1319)..(1321): n is a, c, g, or t
  misc_feature (1323)..(1327): n is a, c, g, or t
  misc_feature (1333)..(1334): n is a, c, g, or t
  misc_feature (1336)..(1336): n is a, c, g, or t
  misc_feature (1338)..(1338): n is a, c, g, or t
  misc_feature (1340)..(1342): n is a, c, g, or t
  misc_feature (1346)..(1348): n is a, c, g, or t
  misc_feature (1350)..(1352): n is a, c, g, or t
  misc_feature (1357)..(1363): n is a, c, g, or t
  misc_feature (1366)..(1366): n is a, c, g, or t
  misc_feature (1370)..(1373): n is a, c, g, or t
  misc_feature (1383)..(1388): n is a, c, g, or t
  misc_feature (1407)..(1407): n is a, c, g, or t
antagagaaattactatgagaggatcgcatcaccatcaccatcacggatcctatttaggtgacactatagaatcgtcgacccacgcgtccgtgggttctcccgattatggcaactcagccctgctcagcttgcctggctaccgccccaccactcgcagttctgctcgtcgttcccaggccggggtgtccagtggggcccctccaggaaggaacagcttctacatgggcacttgccaggatgagcctgagcagctggatgactggaaccgcattgcagagctgcagcagcgcaatcgagtgtgccccccacatctgaagacctgctatcccctggagtccaggccttccctgagcctgggcaccatcacagatgaggagatgaaaactggagacccccaagagaccctgcgccgagccagcatgcagccaatccagatagccgagggcactggcatcaccacccggcagcagcgcaaacgggtctccctagagccccaccagggccctggaactcctgagtctaagaaggccaccagctgtttcccacgccccatgactccccgagaccgacatgaagggcgcaaacagagcactactgaggcccagaagaaagcagctccagcttctactaaacaggctgaccggcgccagtcgatggccttcagcatcctcaacacacccaagaagctagggaacagccttctgcggcggggagcctcaaagaaggccctgtccaaggcttcccccaacactcgcagtggaacccgccgttctccgcgcattgccaccaccacagccagcgccgccactgctgccgccattggtgccacccctcgagccaagggcaaggcaaaagcactaaagggccagtaccagtgagtggccccacctgtgtccccgatgctgccgtcacctggtcctccgcctantgtccctctcantgccttctctcanctccnagccnanantanccaaacccctaaaaanagtgatgcctgcccncaccctggcctggtcctggtcntnnntgggccttttcgaactggccangggnctgnanatgaaaggggggcnctctcctactngcccctttttntaaanaaatccttntcntcnaacnaattnagnngntttanggtggncntggnctggcanntnctttnccnttgnttnaagggncnnaaaanaaagccngnttcngtttntgggggggggccnnanggnccccttttnaatnnaaanggttnannngggnancnncnaaaanttttnnnaanangncntnttnnnanggggngggaanttnnnnnnnnccnntnnnannnnngggggnntngngnnntttnnngnnnttttnnnnnnnaantttnnnnaaaaaaaaannnnnnttttttttttttttttttn

SEQ ID NO: 119 - DNA, 1200 bp, Homo Sapiens
  misc_feature (1)..(1): n is a, c, g, or t
  misc_feature (6)..(7): n is a, c, g, or t
  misc_feature (731)..(731): n is a, c, g, or t
  misc_feature (781)..(781): n is a, c, g, or t
  misc_feature (798)..(798): n is a, c, g, or t
  misc_feature (835)..(835): n is a, c, g, or t
  misc_feature (856)..(856): n is a, c, g, or t
  misc_feature (866)..(867): n is a, c, g, or t
  misc_feature (885)..(885): n is a, c, g, or t
  misc_feature (903)..(903): n is a, c, g, or t
  misc_feature (922)..(922): n is a, c, g, or t
  misc_feature (933)..(933): n is a, c, g, or t
  misc_feature (941)..(941): n is a, c, g, or t
  misc_feature (954)..(954): n is a, c, g, or t
  misc_feature (969)..(969): n is a, c, g, or t
  misc_feature (972)..(973): n is a, c, g, or t
  misc_feature (978)..(978): n is a, c, g, or t
  misc_feature (980)..(980): n is a, c, g, or t
  misc_feature (987)..(987): n is a, c, g, or t
  misc_feature (989)..(989): n is a, c, g, or t
  misc_feature (995)..(995): n is a, c, g, or t
  misc_feature (998)..(998): n is a, c, g, or t
  misc_feature (1001)..(1001): n is a, c, g, or t
  misc_feature (1009)..(1009): n is a, c, g, or t
  misc_feature (1033)..(1033): n is a, c, g, or t
  misc_feature (1035)..(1035): n is a, c, g, or t
  misc_feature (1048)..(1049): n is a, c, g, or t
  misc_feature (1053)..(1053): n is a, c, g, or t
  misc_feature (1062)..(1062): n is a, c, g, or t
  misc_feature (1066)..(1066): n is a, c, g, or t
  misc_feature (1068)..(1070): n is a, c, g, or t
  misc_feature (1073)..(1074): n is a, c, g, or t
  misc_feature (1076)..(1076): n is a, c, g, or t
  misc_feature (1079)..(1079): n is a, c, g, or t
  misc_feature (1081)..(1082): n is a, c, g, or t
  misc_feature (1088)..(1088): n is a, c, g, or t
  misc_feature (1091)..(1091): n is a, c, g, or t
  misc_feature (1095)..(1096): n is a, c, g, or t
  misc_feature (1098)..(1098): n is a, c, g, or t
  misc_feature (1100)..(1102): n is a, c, g, or t
  misc_feature (1104)..(1105): n is a, c, g, or t
  misc_feature (1107)..(1110): n is a, c, g, or t
  misc_feature (1112)..(1112): n is a, c, g, or t
  misc_feature (1129)..(1129): n is a, c, g, or t
  misc_feature (1133)..(1133): n is a, c, g, or t
  misc_feature (1138)..(1139): n is a, c, g, or t
  misc_feature (1144)..(1146): n is a, c, g, or t
  misc_feature (1148)..(1148): n is a, c, g, or t
  misc_feature (1151)..(1151): n is a, c, g, or t
  misc_feature (1157)..(1157): n is a, c, g, or t
  misc_feature (1165)..(1165): n is a, c, g, or t
  misc_feature (1168)..(1168): n is a, c, g, or t
  misc_feature (1173)..(1173): n is a, c, g, or t
  misc_feature (1181)..(1181): n is a, c, g, or t
  misc_feature (1185)..(1186): n is a, c, g, or t
  misc_feature (1190)..(1190): n is a, c, g, or t
naaatnngaggaaattactatgagaggatcgcatcaccatcaccatcacgggatcctatttaggtgacactatagaatcgtcgacccacgcgtccgggttagtttctgcgacttgtgttgggactgctgataggaagatgtcttcaggaaatgctaaaattgggcaccctgcccccaacttcaaagccacagctgttatgccagatggtcagtttaaagatatcagcctgtctgactacaaaggaaaatatgttgtgttcttcttttaccctcttgacttcacctttgtgtgccccacggagatcattgctttcagtgatagggcagaagaatttaagaaactcaactgccaagtgattggtgcttctgtggattctcacttctgtcatctagcatgggtcaatacacctaagaaacaaggaggactgggacccatgaacattcctttggtatcagacccgaagcgcaccattgctcaggattatggggtcttaaaggctgatgaaggcatctcgttcaggggcctttttatcattgatgataagggtattcttcggcagatcactgtaaatgacctccctgttggccgctctgtggatgagactttgagactagttcaggccttccagttcactgacaaacatggggaagtgtgcccagctggctggaaacctggcagtgataccatcaagcctgatgtccaaaagagcaaagaatatttctccaagcanaagtgagcgctgggctgttttagtgccaggctgcggtgggcagccatganaacaaaacctcttctgnatttttttttttccattagtaaaacacaagacttcanattcagccgaattgtggtgtnttacaaaggnnagggccttttccctacangggggtggaaaagaccanccctttctttccttttggnaaggaaaaggncctggaantttggccgtttgnggggcaaggcctacnggnntttgnantgaatgncnttaagnaanganccaacccntttaatccttttggaagttttggnanaaaaactttgganncggnaaaaaaaanaaanannncannanaanannggtaanaanaaannanannnannannnnanggggggggggccccccncccnaaaannggggnnncnaanaaaacnttaatttnacntaaancctggccncccnnttgnaaaaattccc

SEQ ID NO: 120 - DNA, 256 bp, Homo Sapiens
  misc_feature (2)..(2): n is a, c, g, or t
  misc_feature (4)..(4): n is a, c, g, or t
tnanaggagaattaactatgagaggatcgcatcaccatcaccatcacggatcctatttaggtgacactatagaatcgtcgacccacgcgtccggcacaagagaagcacacacaggtgtctgtgttcttggctgcagcccgcatgggccaaggagttcagatccagtgccccccacctcccctttcctgccgccatgctctgtaggcttggcccctcctgctgtgatcctgatcacagccttccaccctagagaatt

SEQ ID NO: 121 - DNA, 1214 bp, Homo Sapiens
  misc_feature (910)..(910): n is a, c, g, or t
  misc_feature (926)..(926): n is a, c, g, or t
  misc_feature (932)..(932): n is a, c, g, or t
  misc_feature (944)..(944): n is a, c, g, or t
  misc_feature (985)..(985): n is a, c, g, or t
  misc_feature (992)..(992): n is a, c, g, or t
  misc_feature (1019)..(1019): n is a, c, g, or t
  misc_feature (1030)..(1030): n is a, c, g, or t
  misc_feature (1036)..(1036): n is a, c, g, or t
  misc_feature (1039)..(1039): n is a, c, g, or t
  misc_feature (1046)..(1046): n is a, c, g, or t
  misc_feature (1064)..(1064): n is a, c, g, or t
  misc_feature (1072)..(1072): n is a, c, g, or t
  misc_feature (1086)..(1086): n is a, c, g, or t
  misc_feature (1089)..(1089): n is a, c, g, or t
  misc_feature (1091)..(1091): n is a, c, g, or t
  misc_feature (1112)..(1112): n is a, c, g, or t
  misc_feature (1118)..(1118): n is a, c, g, or t
  misc_feature (1128)..(1129): n is a, c, g, or t
  misc_feature (1138)..(1138): n is a, c, g, or t
  misc_feature (1154)..(1154): n is a, c, g, or t
  misc_feature (1162)..(1164): n is a, c, g, or t
  misc_feature (1170)..(1170): n is a, c, g, or t
  misc_feature (1173)..(1173): n is a, c, g, or t
  misc_feature (1175)..(1175): n is a, c, g, or t
  misc_feature (1181)..(1181): n is a, c, g, or t
  misc_feature (1187)..(1187): n is a, c, g, or t
  misc_feature (1192)..(1192): n is a, c, g, or t
  misc_feature (1195)..(1195): n is a, c, g, or t
  misc_feature (1197)..(1198): n is a, c, g, or t
  misc_feature (1201)..(1201): n is a, c, g, or t
  misc_feature (1214)..(1214): n is a, c, g, or t
tagagaaattactatgagaggatcgcatcaccatcaccatcacggatcctatttaggtgacactatagaatcgtcgacccacgcgtccgcccacgcgtccgccaaaatgggaaaggaaaagactcatatcaacattgtcgtcattggacacgtagattcgggcaagtccaccactactggccatctgatctataaatgcggtggcatcgacaaaagaaccattgaaaaatttgagaaggaggctgctgagatgggaaagggctccttcaagtatgcctgggtcttggataaactgaaagctgagcgtgaacgtggtatcaccattgatatctccttgtggaaatttgagactagcaagtactatgtgactatcattgatgccccaggacacagagactttatcaaaaacatgattacagggacatctcaggctgactgtgctgtcctgattgttgctgctggtgttggtgaatttgaagctggtatctccaagaatgggcagacccgagagcatgcccttctggcttacacactgggtgtgaaacaactaattgtcggtgttaacaaaatggattccactgagccaccctacagccagaagagatatgaggaaattgttaaggaagtcagcacttacattaagaaaattggctacaaccccgacacagtagcatttgtgccaatttctggttggaatggtgacaacatgctggagccaagtgctaacatgccttggttcaagggatggaaagtcacccgtaaggatggcaatgccagtggaaccacgctgcttgaggctctggactgcatcctaccaccaactcgtccaactgacaagcccttgcgcctgcctctccaggatgtctacaaaattggtggtattggtactgttcctgttggccgagtgganactggtgttctccaancccggnatggtggtcacntttgctccagtcaacgttacaacggaagtaaaaatctgtcnaaatgcncctgaagctttgagtgaagctcttccnggggaaaatgngggctncantgtcaanaatgggtctgtcaagganttcccccnggcaccttgctggngancncaaaatgaccccccatggaanccctgnttccctgccnngggatatcngaaccctccagccaanaaccccgnnntgcccnttntnggatgnccccgnctcantgnannaanttgctgactaaan

SEQ ID NO: 122 - DNA, 1392 bp, Homo Sapiens
  misc_feature (1)..(1): n is a, c, g, or t
  misc_feature (859)..(859): n is a, c, g, or t
  misc_feature (868)..(868): n is a, c, g, or t
  misc_feature (875)..(875): n is a, c, g, or t
  misc_feature (886)..(886): n is a, c, g, or t
  misc_feature (908)..(908): n is a, c, g, or t
  misc_feature (937)..(937): n is a, c, g, or t
  misc_feature (946)..(946): n is a, c, g, or t
  misc_feature (950)..(950): n is a, c, g, or t
  misc_feature (964)..(965): n is a, c, g, or t
  misc_feature (988)..(988): n is a, c, g, or t
  misc_feature (991)..(991): n is a, c, g, or t
  misc_feature (1009)..(1009): n is a, c, g, or t
  misc_feature (1022)..(1022): n is a, c, g, or t
  misc_feature (1033)..(1033): n is a, c, g, or t
  misc_feature (1040)..(1040): n is a, c, g, or t
  misc_feature (1044)..(1044): n is a, c, g, or t
  misc_feature (1046)..(1046): n is a, c, g, or t
  misc_feature (1061)..(1061): n is a, c, g, or t
  misc_feature (1067)..(1067): n is a, c, g, or t
  misc_feature (1081)..(1082): n is a, c, g, or t
  misc_feature (1087)..(1088): n is a, c, g, or t
  misc_feature (1093)..(1093): n is a, c, g, or t
  misc_feature (1095)..(1095): n is a, c, g, or t
  misc_feature (1097)..(1097): n is a, c, g, or t
  misc_feature (1100)..(1100): n is a, c, g, or t
  misc_feature (1105)..(1105): n is a, c, g, or t
  misc_feature (1111)..(1111): n is a, c, g, or t
  misc_feature (1114)..(1114): n is a, c, g, or t
  misc_feature (1120)..(1120): n is a, c, g, or t
  misc_feature (1124)..(1124): n is a, c, g, or t
  misc_feature (1128)..(1128): n is a, c, g, or t
  misc_feature (1132)..(1132): n is a, c, g, or t
  misc_feature (1136)..(1136): n is a, c, g, or t
  misc_feature (1142)..(1143): n is a, c, g, or t
  misc_feature (1148)..(1148): n is a, c, g, or t
  misc_feature (1157)..(1157): n is a, c, g, or t
  misc_feature (1162)..(1162): n is a, c, g, or t
  misc_feature (1168)..(1168): n is a, c, g, or t
  misc_feature (1171)..(1171): n is a, c, g, or t
  misc_feature (1188)..(1188): n is a, c, g, or t
  misc_feature (1192)..(1192): n is a, c, g, or t
  misc_feature (1196)..(1196): n is a, c, g, or t
  misc_feature (1210)..(1210): n is a, c, g, or t
  misc_feature (1219)..(1221): n is a, c, g, or t
  misc_feature (1225)..(1225): n is a, c, g, or t
  misc_feature (1247)..(1247): n is a, c, g, or t
  misc_feature (1253)..(1254): n is a, c, g, or t
  misc_feature (1260)..(1262): n is a, c, g, or t
  misc_feature (1264)..(1265): n is a, c, g, or t
  misc_feature (1273)..(1273): n is a, c, g, or t
  misc_feature (1278)..(1278): n is a, c, g, or t
  misc_feature (1285)..(1289): n is a, c, g, or t
  misc_feature (1295)..(1295): n is a, c, g, or t
  misc_feature (1299)..(1299): n is a, c, g, or t
  misc_feature (1304)..(1304): n is a, c, g, or t
  misc_feature (1307)..(1307): n is a, c, g, or t
  misc_feature (1311)..(1311): n is a, c, g, or t
  misc_feature (1315)..(1317): n is a, c, g, or t
  misc_feature (1319)..(1319): n is a, c, g, or t
  misc_feature (1321)..(1322): n is a, c, g, or t
  misc_feature (1332)..(1334): n is a, c, g, or t
  misc_feature (1336)..(1341): n is a, c, g, or t
  misc_feature (1346)..(1346): n is a, c, g, or t
  misc_feature (1348)..(1348): n is a, c, g, or t
  misc_feature (1351)..(1351): n is a, c, g, or t
  misc_feature (1353)..(1353): n is a, c, g, or t
  misc_feature (1358)..(1359): n is a, c, g, or t
  misc_feature (1365)..(1367): n is a, c, g, or t
  misc_feature (1370)..(1376): n is a, c, g, or t
  misc_feature (1378)..(1378): n is a, c, g, or t
  misc_feature (1380)..(1382): n is a, c, g, or t
  misc_feature (1384)..(1384): n is a, c, g, or t
  misc_feature (1386)..(1387): n is a, c, g, or t
  misc_feature (1391)..(1392): n is a, c, g, or t
nttagagaaaattactatgagaggatcgcatcaccatcaccatcacggatcctatttaggtgacactatagaatcgtcgacccacgcgtccgcccacgcgtccgcagagcatcatcagcaccgtgggccaagctttcgagctgcgcttcaagcagtacctgcacagcccgcccaaggtggcgctgcccccagaaaggctggcagggccggaggagtcggcctggggggacgaggaggactctttggagcacaattactacaacagcatcccggggaaggagccgccgctgggcgggctagtggactccaggctggccctgacacagccctgcgccctcacggccctcgaccagggcccatctccttctctaagagatgcctgcagcctgccatgggacgtggggtccaccggtacaggaccagtggcccagcccccctacccgccgggcccctgtggcccccacggaggaacagctgcgtcaggagccctggtaccacggccggatgagccgccgggcggcagagaggatgcttcgagctgacggggacttccttgtgcgagacagcgtcaccaaccccgggcagtatgtcctcaccggcatgcacgccgggcagcccaagcacctgctgctcgtggaccccgagggcgtggtacggacgaaggacgtgctgtttgagagcatcagccacctgatcgaccaccacctgcagaacgggcagcccatcgtggccgccgagagtgagctgcacctgcgtggcgtggtctcacgggagccctgagccaggtgaccgttctcagccctggctcctgcctgttctcagccccagctcctgcctgtcatggccttggggctctcanccctcctcntggatcntggtcaggccnaaacaccgctgcctctcctttnttcgcatgaacctctggcatggtctttcntcaactggncccngggctgggcaaaannttcttcttgccggggccccttgnccnaccccctcttttgcctgnagtgagggtgttnatacaaaaaanggaaacntttncnccttttaaaaaaaanaattcnaaaaacaacccctnncttcnnaaccntngnccnggggntccccntcncccctnggtnggtncggncaancccccnnaaaantaaaattcnaaaanctgggnaanaaagggaattccgggcngggngggnttttttttcccctnaaaaagggnnncaantttttttaaggggaaccttaangttttnnggtttnnngnnaaaaaatnttggntaaaatnnnnnctttantccntgaanttngggnaacnnntntnnaaaaggaatnnnannnnnngcccntntcntnaaaannaaaaannnttnnnnnnntncnnnantnncccnn

SEQ ID NO: 123 - DNA, 1325 bp, Homo Sapiens
  misc_feature (807)..(807): n is a, c, g, or t
  misc_feature (834)..(834): n is a, c, g, or t
  misc_feature (905)..(905): n is a, c, g, or t
  misc_feature (932)..(932): n is a, c, g, or t
  misc_feature (937)..(937): n is a, c, g, or t
  misc_feature (952)..(952): n is a, c, g, or t
  misc_feature (974)..(1015): n is a, c, g, or t
  misc_feature (1018)..(1021): n is a, c, g, or t
  misc_feature (1026)..(1026): n is a, c, g, or t
  misc_feature (1031)..(1031): n is a, c, g, or t
  misc_feature (1033)..(1033): n is a, c, g, or t
  misc_feature (1037)..(1037): n is a, c, g, or t
  misc_feature (1040)..(1040): n is a, c, g, or t
  misc_feature (1043)..(1043): n is a, c, g, or t
  misc_feature (1050)..(1050): n is a, c, g, or t
  misc_feature (1052)..(1052): n is a, c, g, or t
  misc_feature (1054)..(1054): n is a, c, g, or t
  misc_feature (1056)..(1056): n is a, c, g, or t
  misc_feature (1062)..(1063): n is a, c, g, or t
  misc_feature (1074)..(1074): n is a, c, g, or t
  misc_feature (1076)..(1077): n is a, c, g, or t
  misc_feature (1082)..(1082): n is a, c, g, or t
  misc_feature (1087)..(1088): n is a, c, g, or t
  misc_feature (1091)..(1091): n is a, c, g, or t
  misc_feature (1093)..(1093): n is a, c, g, or t
  misc_feature (1096)..(1096): n is a, c, g, or t
  misc_feature (1102)..(1102): n is a, c, g, or t
  misc_feature (1107)..(1110): n is a, c, g, or t
  misc_feature (1114)..(1114): n is a, c, g, or t
  misc_feature (1130)..(1130): n is a, c, g, or t
  misc_feature (1132)..(1132): n is a, c, g, or t
  misc_feature (1135)..(1135): n is a, c, g, or t
  misc_feature (1141)..(1141): n is a, c, g, or t
  misc_feature (1145)..(1146): n is a, c, g, or t
  misc_feature (1159)..(1159): n is a, c, g, or t
  misc_feature (1167)..(1168): n is a, c, g, or t
  misc_feature (1170)..(1174): n is a, c, g, or t
  misc_feature (1177)..(1177): n is a, c, g, or t
  misc_feature (1180)..(1180): n is a, c, g, or t
  misc_feature (1192)..(1194): n is a, c, g, or t
  misc_feature (1196)..(1196): n is a, c, g, or t
  misc_feature (1201)..(1201): n is a, c, g, or t
  misc_feature (1203)..(1203): n is a, c, g, or t
  misc_feature (1206)..(1207): n is a, c, g, or t
  misc_feature (1218)..(1219): n is a, c, g, or t
  misc_feature (1222)..(1222): n is a, c, g, or t
  misc_feature (1226)..(1228): n is a, c, g, or t
  misc_feature (1233)..(1236): n is a, c, g, or t
  misc_feature (1241)..(1241): n is a, c, g, or t
  misc_feature (1244)..(1245): n is a, c, g, or t
  misc_feature (1261)..(1261): n is a, c, g, or t
  misc_feature (1265)..(1266): n is a, c, g, or t
  misc_feature (1269)..(1275): n is a, c, g, or t
  misc_feature (1277)..(1277): n is a, c, g, or t
  misc_feature (1280)..(1281): n is a, c, g, or t
  misc_feature (1283)..(1284): n is a, c, g, or t
  misc_feature (1286)..(1286): n is a, c, g, or t
  misc_feature (1290)..(1292): n is a, c, g, or t
  misc_feature (1295)..(1297): n is a, c, g, or t
  misc_feature (1299)..(1300): n is a, c, g, or t
  misc_feature (1303)..(1305): n is a, c, g, or t
  misc_feature (1308)..(1308): n is a, c, g, or t
  misc_feature (1310)..(1310): n is a, c, g, or t
  misc_feature (1314)..(1314): n is a, c, g, or t
  misc_feature (1319)..(1319): n is a, c, g, or t
aatagagaaattactatgagaggatcgcatcaccatcaccatcacggatcctatttaggtgacactatagaatcgtcgacccacgcgtccgccaagatggcggatgaagccacgcgacgtgttgtgtctgagatcccggtgctgaagactaacgccggaccccgagatcgtgagttgtgggtgcagcgactgaaggaggaatatcagtcccttatccggtatgtggagaacaacaagaatgctgacaacgattggttccgactggagtccaacaaggaaggaactcggtggtttggaaaatgctggtatatccatgacctcctgaaatatgagtttgacatcgagtttgacattcctatcacatatcctactactgccccagaaattgcagttcctgagctggatggaaagacagcaaagatgtacaggggtggcaaaatatgcctgacggatcatttcaaacctttgtgggccaggaatgtgcccaaatttggactagctcatctcatggctctggggctgggtccatggctggcagtggaaatccctgatctgattcagaagggcgtcatccaacacaaagagaaatgcaaccaatgaagaatcaagccactgaggcagggcagagggacctttgataggctacgatactattttcctgtgcatcacacttaactcatctaactgcttccccggacaccctccacctctagttgttactaagtagctgcagtaggcattgctggggaagaaacaaacacacaccaaacagtactgctacttagtttctaaggctgcacagggaanggaaagactgggctttggacaatctanaggtaatttatatccgcccccaggtggagcaacatgcgattctggaggcacggggggtaactgaaagtgantacatatagtctttctggtttctgganaaaancccatcaataaaaanctgcttcctctggtaaaaaaannnnnnnnnnnnnnnnnnnnnnnnnnnnnnnnnnnnnnnnnnggnnnnccccnccctnangggnccnaanaaacctnantnanctgaannttgaaccccgntnnaaaantcccnnaangnccnccaaanccccnnnngganttttttcaaaaccctngnttncccccngggnntttttttttgggnaaaacccnncnnnnnttnggnaaattttcgggnnnanggaancnaannggaaaaaaaannccnggannnccccnnnnaaatnccnnggcccaaaaaaatttngggnnttnnnnnnntnccnngnncnaaannnacnnncnnggnnnacncntttnaaacnaaaaaa

SEQ ID NO: 124 - DNA, 256 bp, Homo Sapiens
  misc_feature (4)..(4): n is a, c, g, or t
ttanctatgagaggatcgcatcaccatcaccatcacggatcctatttaggtgacactatagaatcgtcgacccacgcgtccgcccacgcgtccgaccagctggaggagaacgcacgcctcttccacccgaagctgatcatcgcaggaaccagctgctactcccgaaacctggaatatgcccggctacggaagattgcagatgagaacggggcgtatctcatggcggacatggctcacatcagcgggctggtggcgg

SEQ ID NO: 125 - DNA, 1286 bp, Homo Sapiens
  misc_feature (514)..(514): n is a, c, g, or t
  misc_feature (771)..(771): n is a, c, g, or t
  misc_feature (791)..(791): n is a, c, g, or t
  misc_feature (826)..(826): n is a, c, g, or t
  misc_feature (838)..(838): n is a, c, g, or t
  misc_feature (841)..(841): n is a, c, g, or t
  misc_feature (850)..(850): n is a, c, g, or t
  misc_feature (854)..(854): n is a, c, g, or t
  misc_feature (857)..(857): n is a, c, g, or t
  misc_feature (863)..(863): n is a, c, g, or t
  misc_feature (877)..(877): n is a, c, g, or t
  misc_feature (915)..(915): n is a, c, g, or t
  misc_feature (918)..(918): n is a, c, g, or t
  misc_feature (936)..(936): n is a, c, g, or t
  misc_feature (947)..(947): n is a, c, g, or t
  misc_feature (951)..(951): n is a, c, g, or t
  misc_feature (958)..(958): n is a, c, g, or t
  misc_feature (960)..(960): n is a, c, g, or t
  misc_feature (963)..(963): n is a, c, g, or t
  misc_feature (965)..(966): n is a, c, g, or t
  misc_feature (970)..(970): n is a, c, g, or t
  misc_feature (972)..(973): n is a, c, g, or t
  misc_feature (979)..(979): n is a, c, g, or t
  misc_feature (991)..(991): n is a, c, g, or t
  misc_feature (1009)..(1009): n is a, c, g, or t
  misc_feature (1016)..(1016): n is a, c, g, or t
  misc_feature (1030)..(1030): n is a, c, g, or t
  misc_feature (1035)..(1035): n is a, c, g, or t
  misc_feature (1037)..(1037): n is a, c, g, or t
  misc_feature (1041)..(1042): n is a, c, g, or t
  misc_feature (1045)..(1045): n is a, c, g, or t
  misc_feature (1047)..(1047): n is a, c, g, or t
  misc_feature (1054)..(1054): n is a, c, g, or t
  misc_feature (1056)..(1056): n is a, c, g, or t
  misc_feature (1063)..(1063): n is a, c, g, or t
  misc_feature (1075)..(1075): n is a, c, g, or t
  misc_feature (1079)..(1079): n is a, c, g, or t
  misc_feature (1084)..(1085): n is a, c, g, or t
  misc_feature (1093)..(1094): n is a, c, g, or t
  misc_feature (1100)..(1100): n is a, c, g, or t
  misc_feature (1102)..(1104): n is a, c, g, or t
  misc_feature (1109)..(1109): n is a, c, g, or t
  misc_feature (1111)..(1112): n is a, c, g, or t
  misc_feature (1115)..(1115): n is a, c, g, or t
  misc_feature (1119)..(1120): n is a, c, g, or t
  misc_feature (1124)..(1125): n is a, c, g, or t
  misc_feature (1130)..(1130): n is a, c, g, or t
  misc_feature (1134)..(1135): n is a, c, g, or t
  misc_feature (1142)..(1143): n is a, c, g, or t
  misc_feature (1149)..(1149): n is a, c, g, or t
  misc_feature (1151)..(1154): n is a, c, g, or t
  misc_feature (1157)..(1157): n is a, c, g, or t
  misc_feature (1160)..(1160): n is a, c, g, or t
  misc_feature (1163)..(1165): n is a, c, g, or t
  misc_feature (1168)..(1168): n is a, c, g, or t
  misc_feature (1172)..(1173): n is a, c, g, or t
  misc_feature (1181)..(1184): n is a, c, g, or t
  misc_feature (1186)..(1186): n is a, c, g, or t
  misc_feature (1190)..(1191): n is a, c, g, or t
  misc_feature (1195)..(1199): n is a, c, g, or t
  misc_feature (1201)..(1201): n is a, c, g, or t
  misc_feature (1208)..(1208): n is a, c, g, or t
  misc_feature (1212)..(1212): n is a, c, g, or t
  misc_feature (1216)..(1217): n is a, c, g, or t
  misc_feature (1222)..(1222): n is a, c, g, or t
  misc_feature (1224)..(1224): n is a, c, g, or t
  misc_feature (1230)..(1230): n is a, c, g, or t
  misc_feature (1233)..(1237): n is a, c, g, or t
  misc_feature (1239)..(1241): n is a, c, g, or t
  misc_feature (1246)..(1247): n is a, c, g, or t
  misc_feature (1250)..(1252): n is a, c, g, or t
  misc_feature (1256)..(1256): n is a, c, g, or t
  misc_feature (1262)..(1262): n is a, c, g, or t
  misc_feature (1273)..(1279): n is a, c, g, or t
aattagagaaattactatgagaggatcgcatcaccatcaccatcacggatcctatttaggtgacactatagaatcgtcgacccacgcgtccgcccacgcgtccgccgagccgagcgcgcggagcagctggggccggggcgcggatgctggaagttcacatcccgtcggtggggcccgaggccgaggggcccaggcagagcccggagaaaagccacatggtgttccgagtggaggtgctgtgcagcgggcgcagacacacggtgccaaggcgctacagcgagttccacgcgctgcacaagcgggtgaggcggcgccgacctcccaccggccccggcccagcctctgtccagcccccgcccaggccctgtgaggcgggcgggcgagccccagcctccgccacccccattactgcctcagtccctgcgcagccggtcagcccccgggcctctgtgggtgggttggggccttcctcgccctcggccggtccaccactcaccagggtctgtcccagtanagcccgaaggcgggggcgcgggagggcttctggctggggcgaagagggcttgagggctcagtcgggatgctgtgatcgcacgcggtaaacctccagtagatcaagaagctgtacaaagtgcccgacttcccctcgaaacgcctgcccaactggaggaccagagggttggaacagcgccggcagggcttggaggcttacatccagggcatcctgtacctgaaccaggaggtgcccaaggagttactggaattcctganacttcggcacttccccacanaccccaaggctagcaactggggcaccctgaggganttcctgcctggnganagcaagctnccancancaccancggcctgtcctgancttcatgtggatccctatgtttgaacccctcccaaaantcnctgccaaagtggtgggtnaaatggtgtgnttcnagggccntntananntttnannattcancccaaaaaaaancccaaccaaaaggggggncttgttncccttgttcctttngccancnaatnnccntngattaantncaaaaanggcctttttggnttgnctccnnaaaaaaannatgggncnnnttttncnnatnaaannccannaaaangggnngggtccnncttttngnnnnggnaanccnnnaantttnnttttcccnnnngncccnntttnnnnncnaattttncccntttnnagggntnaaaaanttnnnnntnnnatttnnaannngganaggggnaaaaatttttnnnnnnntttaaaa

SEQ ID NO: 126 - DNA, 256 bp, Homo Sapiens
ccatccacaacctgctcatgggtgacaccaaggagcagcgcatcctgaaccatgtgctgcagcatgcggagcccgggaacgcacagagcgtgctggaggccattgacacctactgcgagcagaaggagtgggccatgaacgtgggcgacaagaaaggcaagatcgtggacgccgtgattcaggagcaccagccctccgtgctgctggagctgggggcctactgtggctactcagctgtgcgcatggcccgcctgct

SEQ ID NO: 127 - DNA, 1225 bp, Homo Sapiens
  misc_feature (883)..(883): n is a, c, g, or t
  misc_feature (887)..(887): n is a, c, g, or t
  misc_feature (894)..(894): n is a, c, g, or t
  misc_feature (904)..(904): n is a, c, g, or t
  misc_feature (921)..(921): n is a, c, g, or t
  misc_feature (941)..(941): n is a, c, g, or t
  misc_feature (949)..(949): n is a, c, g, or t
  misc_feature (959)..(959): n is a, c, g, or t
  misc_feature (965)..(965): n is a, c, g, or t
  misc_feature (973)..(973): n is a, c, g, or t
  misc_feature (977)..(977): n is a, c, g, or t
  misc_feature (988)..(988): n is a, c, g, or t
  misc_feature (990)..(990): n is a, c, g, or t
  misc_feature (999)..(999): n is a, c, g, or t
  misc_feature (1003)..(1003): n is a, c, g, or t
  misc_feature (1011)..(1011): n is a, c, g, or t
  misc_feature (1024)..(1024): n is a, c, g, or t
  misc_feature (1029)..(1029): n is a, c, g, or t
  misc_feature (1032)..(1032): n is a, c, g, or t
  misc_feature (1041)..(1041): n is a, c, g, or t
  misc_feature (1046)..(1048): n is a, c, g, or t
  misc_feature (1070)..(1070): n is a, c, g, or t
  misc_feature (1087)..(1087): n is a, c, g, or t
  misc_feature (1090)..(1090): n is a, c, g, or t
  misc_feature (1094)..(1094): n is a, c, g, or t
  misc_feature (1098)..(1098): n is a, c, g, or t
  misc_feature (1107)..(1107): n is a, c, g, or t
  misc_feature (1109)..(1110): n is a, c, g, or t
  misc_feature (1133)..(1133): n is a, c, g, or t
  misc_feature (1139)..(1139): n is a, c, g, or t
  misc_feature (1147)..(1147): n is a, c, g, or t
  misc_feature (1152)..(1152): n is a, c, g, or t
  misc_feature (1161)..(1161): n is a, c, g, or t
  misc_feature (1165)..(1165): n is a, c, g, or t
  misc_feature (1172)..(1173): n is a, c, g, or t
  misc_feature (1175)..(1175): n is a, c, g, or t
  misc_feature (1183)..(1184): n is a, c, g, or t
  misc_feature (1194)..(1194): n is a, c, g, or t
  misc_feature (1201)..(1202): n is a, c, g, or t
  misc_feature (1204)..(1204): n is a, c, g, or t
  misc_feature (1213)..(1213): n is a, c, g, or t
tagagaaattactatgagaggatcgcatcaccatcaccatcacggatcctatttaggtgacactatagaatcgtcgacccacgcgtccgccaagatcaacgcgagcaagaatcagcaggatgacggtaaaatgtttattggaggcttgagctgggatacaagcaaaaaagatctgacagagtacttgtctcgatttggggaagttgtagactgcacaattaaaacagatccagtcactgggagatcaagaggatttggatttgtgcttttcaaagatgctgctagtgttgataaggttttggaactgaaagaacacaaactggatggcaaattgatagatcccaaaagggccaaagctttaaaagggaaagaacctcccaaaaaggtttttgtgggtggattgagcccggatacttctgaagaacaaattaaagaatattttggagcctttggagagattgaaaatattgaacttcccatggatacaaaaacaaatgaaagaagaggattttgttttatcacatatactgatgaagagccagtaaaaaaattgttagaaagcagataccatcaaattggttctgggaagtgtgaaatcaaagttgcacaacccaaagaggtatataggcagcaacagcaacaacaaaaaggtggaagaggtgctgcagctggtggacgaggtggtacgaggggtcgtggccgaggtcagggccaaaactggaaccaaggatttaataactattatgatcaaggatatggaaattacaatagtgcctatggtggtgatcaaaactatagtggctatggcggatatgattatactgggtataactatgggaactatggatatggacagggatatgcagactacagtggcccacanagcncttatgncaaggcatcncgaggggggggcaatcnccaaaccatttcccgccctnctaagggnaacttggganaaaacnggggggtntaanagtccggaaancnttaaaatgnctantttatttnaagaatcattaancaatngancgtaaaacnaaaannnaggacccggtttaccaaatggngattttttattggcttnagncccngttngccaaaggncnnaaaacctttacctttaagcctancccccnttctttanatggnaaaaacctnaaanttttctnntncttttggnncccggggccnaaagaanntnaaccttttnaactttacgggg

SEQ ID NO: 128 - DNA, 1313 bp, Homo Sapiens
  misc_feature (1)..(1): n is a, c, g, or t
  misc_feature (846)..(846): n is a, c, g, or t
  misc_feature (884)..(884): n is a, c, g, or t
  misc_feature (928)..(928): n is a, c, g, or t
  misc_feature (930)..(930): n is a, c, g, or t
  misc_feature (953)..(953): n is a, c, g, or t
  misc_feature (958)..(958): n is a, c, g, or t
  misc_feature (963)..(964): n is a, c, g, or t
  misc_feature (975)..(975): n is a, c, g, or t
  misc_feature (981)..(981): n is a, c, g, or t
  misc_feature (987)..(987): n is a, c, g, or t
  misc_feature (1000)..(1000): n is a, c, g, or t
  misc_feature (1006)..(1006): n is a, c, g, or t
  misc_feature (1018)..(1018): n is a, c, g, or t
  misc_feature (1035)..(1035): n is a, c, g, or t
  misc_feature (1057)..(1057): n is a, c, g, or t
  misc_feature (1061)..(1061): n is a, c, g, or t
  misc_feature (1066)..(1066): n is a, c, g, or t
  misc_feature (1070)..(1070): n is a, c, g, or t
  misc_feature (1072)..(1072): n is a, c, g, or t
  misc_feature (1078)..(1078): n is a, c, g, or t
  misc_feature (1084)..(1084): n is a, c, g, or t
  misc_feature (1102)..(1103): n is a, c, g, or t
  misc_feature (1108)..(1108): n is a, c, g, or t
  misc_feature (1110)..(1110): n is a, c, g, or t
  misc_feature (1113)..(1113): n is a, c, g, or t
  misc_feature (1117)..(1117): n is a, c, g, or t
  misc_feature (1121)..(1121): n is a, c, g, or t
  misc_feature (1124)..(1124): n is a, c, g, or t
  misc_feature (1136)..(1137): n is a, c, g, or t
  misc_feature (1147)..(1147): n is a, c, g, or t
  misc_feature (1154)..(1155): n is a, c, g, or t
  misc_feature (1158)..(1159): n is a, c, g, or t
  misc_feature (1164)..(1164): n is a, c, g, or t
  misc_feature (1169)..(1169): n is a, c, g, or t
  misc_feature (1179)..(1179): n is a, c, g, or t
  misc_feature (1181)..(1182): n is a, c, g, or t
  misc_feature (1185)..(1185): n is a, c, g, or t
  misc_feature (1188)..(1188): n is a, c, g, or t
  misc_feature (1191)..(1191): n is a, c, g, or t
  misc_feature (1194)..(1194): n is a, c, g, or t
  misc_feature (1198)..(1198): n is a, c, g, or t
  misc_feature (1200)..(1200): n is a, c, g, or t
  misc_feature (1204)..(1205): n is a, c, g, or t
  misc_feature (1210)..(1210): n is a, c, g, or t
  misc_feature (1214)..(1215): n is a, c, g, or t
  misc_feature (1220)..(1221): n is a, c, g, or t
  misc_feature (1223)..(1223): n is a, c, g, or t
  misc_feature (1227)..(1227): n is a, c, g, or t
  misc_feature (1233)..(1234): n is a, c, g, or t
  misc_feature (1236)..(1236): n is a, c, g, or t
  misc_feature (1239)..(1239): n is a, c, g, or t
  misc_feature (1241)..(1241): n is a, c, g, or t
  misc_feature (1247)..(1247): n is a, c, g, or t
  misc_feature (1256)..(1256): n is a, c, g, or t
  misc_feature (1258)..(1259): n is a, c, g, or t
  misc_feature (1264)..(1265): n is a, c, g, or t
  misc_feature (1270)..(1270): n is a, c, g, or t
  misc_feature (1276)..(1276): n is a, c, g, or t
  misc_feature (1278)..(1278): n is a, c, g, or t
  misc_feature (1287)..(1288): n is a, c, g, or t
  misc_feature (1290)..(1291): n is a, c, g, or t
  misc_feature (1296)..(1299): n is a, c, g, or t
  misc_feature (1303)..(1303): n is a, c, g, or t
  misc_feature (1308)..(1308): n is a, c, g, or t
  misc_feature (1310)..(1312): n is a, c, g, or t
naatagagaaattactatgagaggatcgcatcaccatcaccatcacggatcctatttaggtgacactatagaatcgtcgacccacgcgtccgtggtgcgctgtcttcccgcttgcgtcagggacctgcccgactcagtggccgccatggcatcagatgaaggcaaactttttgttggagggctgagttttgacaccaatgagcagtcgctggagcaggtcttctcaaagtacggacagatctctgaagtggtggttgtgaaagacagggagacccagagatctcggggatttgggtttgtcacctttgagaacattgacgacgctaaggatgccatgatggccatgaatgggaagtctgtagatggacggcagatccgagtagaccaggcaggcaagtcgtcagacaaccgatcccgtgggtaccgtggtggctctgccgggggccggggcttcttccgtgggggccgaggacggggccgtgggttctctagaggaggaggggaccgaggctatggggggaaccggttcgagtccaggagtgggggctacggaggctccagagactactatagcagccggagtcagagtggtggctacagtgaccggagctcgggcgggtcctacagagacagttacgacagttacgctacacacaacgagtaaaaacccttcctgctcaagatcgtccttccaatggctgtgtgtttaaagattgtgggagcttcgctgaacgttaatgtgtagtaaatgcacctccttgtattcccactttcgtagtcatttcggttctgatcttgtcaaacccagcctgaccgcttctgacgccgggatggcctcgttactanacttttcttttttaaggaagtgctgttttttttttganggttttcaaaacattttgaaaagcatttactttttttgaccacnanccatgaatttttcaaaaaaatcnggggntgggnngggtttttggnttttgntttaanttttgggttgccnttgccntttttttttttnaggggggttggcccccntgaaagggggtgccccccctcncttnctctnaaantnaaacgnaattgnaaatccccccctttttcnnaaacntnaancaanctgnggntttttttccaanncccggggaancttttcnnaanntaaanggggnaaaaaccccncnnggntgnggnaanaaantncccnngaaancccnnccccnngnttcntttttnntnttngncccccnaaaaaaaangnnaaaannccccnaaaaantntttaaaaanntnnttaannnncccnttttnannna

SEQ ID NO: 129 - DNA, 1383 bp, Homo Sapiens
  misc_feature (862)..(862): n is a, c, g, or t
  misc_feature (877)..(877): n is a, c, g, or t
  misc_feature (944)..(944): n is a, c, g, or t
  misc_feature (948)..(948): n is a, c, g, or t
  misc_feature (1007)..(1007): n is a, c, g, or t
  misc_feature (1009)..(1009): n is a, c, g, or t
  misc_feature (1020)..(1020): n is a, c, g, or t
  misc_feature (1028)..(1029): n is a, c, g, or t
  misc_feature (1031)..(1031): n is a, c, g, or t
  misc_feature (1035)..(1035): n is a, c, g, or t
  misc_feature (1038)..(1038): n is a, c, g, or t
  misc_feature (1045)..(1045): n is a, c, g, or t
  misc_feature (1057)..(1057): n is a, c, g, or t
  misc_feature (1061)..(1061): n is a, c, g, or t
  misc_feature (1071)..(1072): n is a, c, g, or t
  misc_feature (1079)..(1079): n is a, c, g, or t
  misc_feature (1100)..(1100): n is a, c, g, or t
  misc_feature (1115)..(1115): n is a, c, g, or t
  misc_feature (1121)..(1122): n is a, c, g, or t
  misc_feature (1127)..(1127): n is a, c, g, or t
  misc_feature (1137)..(1137): n is a, c, g, or t
  misc_feature (1151)..(1152): n is a, c, g, or t
  misc_feature (1155)..(1155): n is a, c, g, or t
  misc_feature (1158)..(1158): n is a, c, g, or t
  misc_feature (1171)..(1172): n is a, c, g, or t
  misc_feature (1187)..(1187): n is a, c, g, or t
  misc_feature (1191)..(1191): n is a, c, g, or t
  misc_feature (1198)..(1198): n is a, c, g, or t
  misc_feature (1200)..(1200): n is a, c, g, or t
  misc_feature (1202)..(1203): n is a, c, g, or t
  misc_feature (1212)..(1212): n is a, c, g, or t
  misc_feature (1233)..(1233): n is a, c, g, or t
  misc_feature (1242)..(1242): n is a, c, g, or t
  misc_feature (1244)..(1244): n is a, c, g, or t
  misc_feature (1246)..(1246): n is a, c, g, or t
  misc_feature (1248)..(1248): n is a, c, g, or t
  misc_feature (1255)..(1255): n is a, c, g, or t
  misc_feature (1257)..(1257): n is a, c, g, or t
  misc_feature (1267)..(1268): n is a, c, g, or t
  misc_feature (1271)..(1271): n is a, c, g, or t
  misc_feature (1275)..(1275): n is a, c, g, or t
  misc_feature (1299)..(1299): n is a, c, g, or t
  misc_feature (1328)..(1328): n is a, c, g, or t
  misc_feature (1335)..(1335): n is a, c, g, or t
  misc_feature (1338)..(1338): n is a, c, g, or t
  misc_feature (1340)..(1340): n is a, c, g, or t
  misc_feature (1351)..(1351): n is a, c, g, or t
  misc_feature (1355)..(1355): n is a, c, g, or t
  misc_feature (1361)..(1362): n is a, c, g, or t
  misc_feature (1381)..(1382): n is a, c, g, or t
atagagaaattactatgagaggatcgcatcaccatcaccatcacggatcctatttaggtgacactatagaatcgtcgacccacgcgtccgaccaagcgctccaggggctttgggtttgtcacatatgccactgtggaggaggtggatgcagctatgaatgcaaggccacacaaggtggatggaagagttgtggaaccaaagagagctgtctccagagaagattctcaaagaccaggtgcccacttaactgtgaaaaagatatttgttggtggcattaaagaagacactgaagaacatcacctaagagattattttgaacagtatggaaaaattgaagtgattgaaatcatgactgaccgaggcagtggcaagaaaaggggctttgcctttgtaacctttgacgaccatgactccgtggataagattgtcattcagaaataccatactgtgaatggccacaactgtgaagttagaaaagccctgtcaaagcaagagatggctagtgcttcatccagccaaagaggtcgaagtggttctggaaactttggtggtggtcgtggaggtggtttcggtgggaatgacaacttcggtcgtggaggaaacttcagtggtcgtggtggctttggtggcagccgtggtggtggtggatatggtggcagtggggatggctataatggatttggtaatgatggtggttatggaggaggcggccctggttactctggaggaagcagaggctatggaagtggtggacagggttatggaaaccagggcagtggctatggcgggagtggcagctatgacagctataacaacggaggcggaggcggctttggcggtggtagtggaagcaattttggangtggtggaagctacnatgattttgggaattacaacaatcagtcttcaaattttggacccatgaagggaggaaatttttggangcanaagctctggcccctatggcggtggaaggccaatactttgcaaacccccaaaaccaaggngnctatggcggtnccgccacnncnatanctntggcatngcaaaaaatttnattnggaaaccaanncttaccnggaaaggaaaaccccaaaaantgccagggaaacctnccggtnncaccnatttttgacnccccccaaccccannggnggncaggccccaaccnnctccaaaaaaaactntttnaaaaaancncnnttggttggnccaaaaaaccccgggaccgtnttttggccnantntnaaacagntnttttttttcnnttntggnaaaggtaaacccttccccaagggntttagggaattttttttttccccccggtntttttcnaantnacccccccccncccnaaaaanncttttttagggcgggaaannc

SEQ ID NO: 130 - DNA, 256 bp, Homo Sapiens
  misc_feature (5)..(5): n is a, c, g, or t
agagnaaattaactatgagaggatcgcatcaccatcaccatcacggatcctatttaggtgacactatagaatcgtcgacccacgcgtccgcgtcgccgccatcctcggcgcgactcgcttctttcggttctacctgggagaatccaccgccatccgccaccatggtgaacttcacggtagaccagatccgcgccatcatggacaagaaggccaacatccgcaacatgtctgtcatcgcccacgtggaccatggcaa

SEQ ID NO: 131 - DNA, 256 bp, Homo Sapiens
  misc_feature (1)..(1): n is a, c, g, or t
  misc_feature (4)..(5): n is a, c, g, or t
nacnntgagaggatcgcatcaccatcaccatcacggatcctatttaggtgacactatagaatcgtcgacccacgcgtccgcggacgcgtggggcgctgcggacactcggggcggcagtcggtctgtcagtcctcccgccaggtcccgcggcccgcacctgccgcccgcacctgcagctccgcacctgcggccagtgcctactgccctctcttgccgcccgcacctgcagccccgcacctgccgcttgcacctgcag

SEQ ID NO: 132 - DNA, 986 bp, Homo Sapiens
  misc_feature (774)..(774): n is a, c, g, or t
  misc_feature (879)..(879): n is a, c, g, or t
  misc_feature (902)..(902): n is a, c, g, or t
  misc_feature (905)..(905): n is a, c, g, or t
  misc_feature (910)..(910): n is a, c, g, or t
  misc_feature (923)..(929): n is a, c, g, or t
  misc_feature (931)..(935): n is a, c, g, or t
  misc_feature (937)..(937): n is a, c, g, or t
  misc_feature (940)..(941): n is a, c, g, or t
  misc_feature (943)..(986): n is a, c, g, or t
tagagaaattactatgagaggatcgcatcaccatcaccatcacggatcctatttaggtgacactatagaatcgtcgacccacgcgtccgcccacgcgtccggcgcacagggcgagggcggctgcggcgcagtctgcagcatggcgtacccggggcatcctggcgccggcggcgggtactacccaggcgggtatggaggggctcccggagggcctgcgtttcccggacaaactcaggatccgctgtatggttactttgctgttgtagctggacaggatgggcagatagatgctgatgaattgcagagatgtctgacacagtctggcattgctggaggatacaaaccttttaacctggagacttgccggcttatggtttcaatgctggatagagatatgtctggcacaatgggtttcaatgaatttaaagaactctgggctgtactgaatggctggagacaacactttatcagttttgacactgacaggagtggaacagtagacccacaagaattgcagaaggccctgacaacaatgggatttaggttgagtccccaggctgtgaattcaattgcaaaacgatacagcaccaatggaaagatcaccttcgacgactacatcgcctgctgcgtcaaactgagggctcttacagacagctttcgaagacgggatactgctcagcaaggtgttgtgaatttcccatatgatgatttcattcaatgtgtcatgagtgtttaaatcaagaggaagctgcatgaatgtaatcaacattccanctggagctctcctttgcttgtcctctttgccttcggtaatatgtataaacttacatcacgactttctcttaacagctgttgtaaagtttattactttatgtacanctgaagtttgttttaattttganaanaaatnctttggaactttnnnnnnnannnnnanaannannnnnnnnnnnnnnnnnnnnnnnnnnnnnnnnnnnnnnnnnnnn

SEQ ID NO: 133 - DNA, 1383 bp, Homo Sapiens
  misc_feature (543)..(543): n is a, c, g, or t
  misc_feature (659)..(659): n is a, c, g, or t
  misc_feature (665)..(665): n is a, c, g, or t
  misc_feature (687)..(687): n is a, c, g, or t
  misc_feature (710)..(710): n is a, c, g, or t
  misc_feature (719)..(719): n is a, c, g, or t
  misc_feature (726)..(726): n is a, c, g, or t
  misc_feature (738)..(738): n is a, c, g, or t
  misc_feature (749)..(749): n is a, c, g, or t
  misc_feature (768)..(768): n is a, c, g, or t
  misc_feature (791)..(791): n is a, c, g, or t
  misc_feature (799)..(799): n is a, c, g, or t
  misc_feature (808)..(808): n is a, c, g, or t
  misc_feature (817)..(817): n is a, c, g, or t
  misc_feature (819)..(819): n is a, c, g, or t
  misc_feature (836)..(836): n is a, c, g, or t
  misc_feature (841)..(841): n is a, c, g, or t
  misc_feature (858)..(859): n is a, c, g, or t
  misc_feature (872)..(872): n is a, c, g, or t
  misc_feature (878)..(878): n is a, c, g, or t
  misc_feature (905)..(905): n is a, c, g, or t
  misc_feature (921)..(921): n is a, c, g, or t
  misc_feature (926)..(927): n is a, c, g, or t
  misc_feature (932)..(932): n is a, c, g, or t
  misc_feature (939)..(939): n is a, c, g, or t
  misc_feature (946)..(946): n is a, c, g, or t
  misc_feature (949)..(950): n is a, c, g, or t
  misc_feature (958)..(958): n is a, c, g, or t
  misc_feature (966)..(967): n is a, c, g, or t
  misc_feature (970)..(970): n is a, c, g, or t
  misc_feature (976)..(978): n is a, c, g, or t
  misc_feature (992)..(992): n is a, c, g, or t
  misc_feature (994)..(994): n is a, c, g, or t
  misc_feature (997)..(997): n is a, c, g, or t
  misc_feature (1004)..(1006): n is a, c, g, or t
  misc_feature (1013)..(1014): n is a, c, g, or t
  misc_feature (1018)..(1018): n is a, c, g, or t
  misc_feature (1029)..(1029): n is a, c, g, or t
  misc_feature (1034)..(1036): n is a, c, g, or t
  misc_feature (1039)..(1040): n is a, c, g, or t
  misc_feature (1052)..(1052): n is a, c, g, or t
  misc_feature (1054)..(1054): n is a, c, g, or t
  misc_feature (1060)..(1060): n is a, c, g, or t
  misc_feature (1068)..(1068): n is a, c, g, or t
  misc_feature (1073)..(1074): n is a, c, g, or t
  misc_feature (1078)..(1079): n is a, c, g, or t
  misc_feature (1083)..(1083): n is a, c, g, or t
  misc_feature (1085)..(1086): n is a, c, g, or t
  misc_feature (1088)..(1090): n is a, c, g, or t
  misc_feature (1093)..(1093): n is a, c, g, or t
  misc_feature (1095)..(1095): n is a, c, g, or t
  misc_feature (1100)..(1105): n is a, c, g, or t
  misc_feature (1110)..(1111): n is a, c, g, or t
  misc_feature (1119)..(1119): n is a, c, g, or t
  misc_feature (1129)..(1129): n is a, c, g, or t
  misc_feature (1138)..(1138): n is a, c, g, or t
  misc_feature (1140)..(1140): n is a, c, g, or t
  misc_feature (1145)..(1147): n is a, c, g, or t
  misc_feature (1153)..(1153): n is a, c, g, or t
  misc_feature (1169)..(1170): n is a, c, g, or t
  misc_feature (1176)..(1176): n is a, c, g, or t
  misc_feature (1182)..(1182): n is a, c, g, or t
  misc_feature (1186)..(1186): n is a, c, g, or t
  misc_feature (1195)..(1195): n is a, c, g, or t
  misc_feature (1197)..(1197): n is a, c, g, or t
  misc_feature (1201)..(1202): n is a, c, g, or t
  misc_feature (1212)..(1214): n is a, c, g, or t
  misc_feature (1222)..(1222): n is a, c, g, or t
  misc_feature (1224)..(1226): n is a, c, g, or t
  misc_feature (1229)..(1231): n is a, c, g, or t
  misc_feature (1236)..(1236): n is a, c, g, or t
  misc_feature (1240)..(1241): n is a, c, g, or t
  misc_feature (1246)..(1246): n is a, c, g, or t
  misc_feature (1250)..(1251): n is a, c, g, or t
  misc_feature (1258)..(1258): n is a, c, g, or t
  misc_feature (1264)..(1264): n is a, c, g, or t
  misc_feature (1267)..(1268): n is a, c, g, or t
  misc_feature (1271)..(1271): n is a, c, g, or t
  misc_feature (1273)..(1273): n is a, c, g, or t
  misc_feature (1276)..(1277): n is a, c, g, or t
  misc_feature (1280)..(1280): n is a, c, g, or t
  misc_feature (1287)..(1287): n is a, c, g, or t
  misc_feature (1290)..(1291): n is a, c, g, or t
  misc_feature (1299)..(1302): n is a, c, g, or t
  misc_feature (1304)..(1304): n is a, c, g, or t
  misc_feature (1311)..(1311): n is a, c, g, or t
  misc_feature (1315)..(1315): n is a, c, g, or t
  misc_feature (1319)..(1319): n is a, c, g, or t
  misc_feature (1321)..(1321): n is a, c, g, or t
  misc_feature (1338)..(1341): n is a, c, g, or t
  misc_feature (1344)..(1345): n is a, c, g, or t
  misc_feature (1351)..(1351): n is a, c, g, or t
  misc_feature (1355)..(1358): n is a, c, g, or t
  misc_feature (1362)..(1362): n is a, c, g, or t
  misc_feature (1364)..(1364): n is a, c, g, or t
  misc_feature (1368)..(1369): n is a, c, g, or t
  misc_feature (1376)..(1378): n is a, c, g, or t
  misc_feature (1383)..(1383): n is a, c, g, or t
agagaaattaactatgagaggatcgcatcaccatcaccatcacggatcctatttaggtgacactatagaatcgtcgacccacgcgtccgggtcacggcaatcaaccccctgctgtggttcccgaaccccaaggcccgatgggtcccgcgggggtcgcggcgaggccagggcgctttttcggcgtctacctgctctactgcctgaacccccggtaccggggccgcgtctacgtggggttcactgtcaacactgctcgtcgggtccagcagcacaatgggggccgcaaaaaaggcggggcctggcggaccagcgggcgagggccctgggagatggtgctcgtcgtgcacggcttcccgtcctccgtggccgcccttcggtttgagtgggcttggcagcacccgcacgcctcgcgccgcctggcgcacgtggggcctcgcctgcgaggagagacagccttcgctttccacctgcgcgtgctggcgcacatgctgcgcgcaccgccctgggctcgcctcccgctcacgctgcgctgggtgcgcccanacctccgccaggacctctgcctcccgccgccgccgcacgtgcctctggccttcgggcctccaccgccccaggccccggccccaaggcgccgcgcaggtccctttgatgacgcggancctganccagaccagggggatccagggncctgctgctccctgtgcgcccanaccatccangatgaanaggggcccttgngttgcccccancctggctgcctgctaaggncccatgtgatctgcctgaaagangaattttnttcaagaanaaccagganancttctgcccctaaaggnccaangcccttgctgtgaaaanncactgtttttggnaaaacntgatttggttgtgccaaatggacattnaaaaagaaataaaaanactcnnaattnaaaaagncacactngannaaacttgntgaaaacnnatnctcaannnccttaccccctccnanctnctttttnnngcaactnntttngattccacagnttttnnnttnnttaaaaaaaaantntaatcnaaaaaaanaaatnnaatnntaanannannnaantnaaaannnnnnttgtnncccccccnaaaaatttanaaatttaanantaaannnaccctnttaaaaaaaaaaaacnnaaaatntttttntttntaaaaactnanttcnnggtttttttnnnaaaaccanannnttnnnatttntatnnaaaanaaannaaaaaantgaatnccnnaantnccnngtnaaaaaanttnntatatatnnnnantaaaaanttantatntntttataaaaaaaaaatnnnntcnnttctcnaaannnnattnanaaannttttaannnttatn

SEQ ID NO: 134 - DNA, 1200 bp, Homo Sapiens
  misc_feature (3)..(11): n is a, c, g, or t
  misc_feature (13)..(14): n is a, c, g, or t
  misc_feature (17)..(17): n is a, c, g, or t
  misc_feature (497)..(497): n is a, c, g, or t
  misc_feature (552)..(552): n is a, c, g, or t
  misc_feature (567)..(567): n is a, c, g, or t
  misc_feature (642)..(642): n is a, c, g, or t
  misc_feature (655)..(655): n is a, c, g, or t
  misc_feature (715)..(715): n is a, c, g, or t
  misc_feature (742)..(742): n is a, c, g, or t
  misc_feature (757)..(757): n is a, c, g, or t
  misc_feature (767)..(767): n is a, c, g, or t
  misc_feature (797)..(797): n is a, c, g, or t
  misc_feature (815)..(815): n is a, c, g, or t
  misc_feature (820)..(820): n is a, c, g, or t
  misc_feature (832)..(832): n is a, c, g, or t
  misc_feature (862)..(863): n is a, c, g, or t
  misc_feature (869)..(869): n is a, c, g, or t
  misc_feature (876)..(876): n is a, c, g, or t
  misc_feature (883)..(883): n is a, c, g, or t
  misc_feature (889)..(889): n is a, c, g, or t
  misc_feature (895)..(895): n is a, c, g, or t
  misc_feature (904)..(904): n is a, c, g, or t
  misc_feature (940)..(941): n is a, c, g, or t
  misc_feature (948)..(948): n is a, c, g, or t
  misc_feature (952)..(952): n is a, c, g, or t
  misc_feature (960)..(960): n is a, c, g, or t
  misc_feature (973)..(973): n is a, c, g, or t
  misc_feature (977)..(977): n is a, c, g, or t
  misc_feature (984)..(984): n is a, c, g, or t
  misc_feature (988)..(988): n is a, c, g, or t
  misc_feature (1001)..(1002): n is a, c, g, or t
  misc_feature (1017)..(1017): n is a, c, g, or t
  misc_feature (1022)..(1022): n is a, c, g, or t
  misc_feature (1033)..(1033): n is a, c, g, or t
  misc_feature (1037)..(1037): n is a, c, g, or t
  misc_feature (1042)..(1043): n is a, c, g, or t
  misc_feature (1046)..(1046): n is a, c, g, or t
  misc_feature (1054)..(1054): n is a, c, g, or t
  misc_feature (1058)..(1058): n is a, c, g, or t
  misc_feature (1066)..(1067): n is a, c, g, or t
  misc_feature (1079)..(1079): n is a, c, g, or t
  misc_feature (1084)..(1084): n is a, c, g, or t
  misc_feature (1092)..(1094): n is a, c, g, or t
  misc_feature (1102)..(1102): n is a, c, g, or t
  misc_feature (1130)..(1130): n is a, c, g, or t
  misc_feature (1144)..(1144): n is a, c, g, or t
  misc_feature (1150)..(1150): n is a, c, g, or t
  misc_feature (1159)..(1160): n is a, c, g, or t
  misc_feature (1176)..(1176): n is a, c, g, or t
  misc_feature (1179)..(1180): n is a, c, g, or t
  misc_feature (1186)..(1186): n is a, c, g, or t
  misc_feature (1190)..(1190): n is a, c, g, or t
ccnnnnnnnnnannaantagagaaaaattactgggagagggatcgcatcaccatcaccagtcacggatcctatttagggtgacacatatagaatcgctcgacccacgcgtccgatggttttgtggagtttgatgatctgcgtgatgcagatgatgctgtttatgaactgaatggcaaagacctttgtggtgagcgagtaattgttgagcatgcccgcggcccacggcgagatggcagttacggttctggacgcagtggatatggttatagaagaagtggccgagataaatatggccctcctactcgcacagagtacagacttattgtggagaatttgtcaagtcggtgcagctggcaagacctaaaggattatatgcgtcaggcaggagaagtgacttatgcagatgctcacaagggacgcaaaaatgaaggggtgattgaatttgtatcttattctgatatgaaaagagctttggaaaagttggatggaactgaantcaatgggagaaaaatcagattagttgaagacaagccaggttccagacgacgccngtcctactccaaaanccggagtcattcaaggtctcgctctcgaagcagacattcccgtaagagcagaagccgaagtggcagcagcaaaancagtcattctaanagtagatctcggtccaggtcgggctcccgctcccggagcaagagccggagccggagccanagtcggagccggagcaagaaagagaanaagcaggagccccancaaggacaanagccgcagccgcagccatagcgctggcaanagccgcagcaagagcaanaccangctgaaaagaanaatcccaaaaacaatgacaatgtcgggaannccatantcttgancccggancatganccaaangggggccancaaggagccggaaccaggaagccccatccaggaccnnaggaccnaganggaagggncgggaaaaataancccnaaaaggnaganccgcaatccccanntctccaacccgcaancaaanattgaacaagnaccnaaaannccnagggcccncaanccaaaacnncaaaggccgggnccccnccaaaaannnaaaaaaanggaaaaaccctgaacccctccccagttnccaaaatttccctncccccnccccgtgtnnaaaggaacccggaaanttnncccggntctnaaatcccccc

SEQ ID NO: 135 - DNA, 1179 bp, Homo Sapiens
  misc_feature (11)..(11): n is a, c, g, or t
  misc_feature (816)..(816): n is a, c, g, or t
  misc_feature (818)..(818): n is a, c, g, or t
  misc_feature (828)..(828): n is a, c, g, or t
  misc_feature (836)..(836): n is a, c, g, or t
  misc_feature (882)..(882): n is a, c, g, or t
  misc_feature (885)..(885): n is a, c, g, or t
  misc_feature (927)..(927): n is a, c, g, or t
  misc_feature (929)..(929): n is a, c, g, or t
  misc_feature (940)..(942): n is a, c, g, or t
  misc_feature (949)..(949): n is a, c, g, or t
  misc_feature (963)..(963): n is a, c, g, or t
  misc_feature (968)..(968): n is a, c, g, or t
  misc_feature (989)..(989): n is a, c, g, or t
  misc_feature (991)..(991): n is a, c, g, or t
  misc_feature (1001)..(1001): n is a, c, g, or t
  misc_feature (1011)..(1011): n is a, c, g, or t
  misc_feature (1014)..(1014): n is a, c, g, or t
  misc_feature (1017)..(1018): n is a, c, g, or t
  misc_feature (1020)..(1020): n is a, c, g, or t
  misc_feature (1031)..(1031): n is a, c, g, or t
  misc_feature (1033)..(1033): n is a, c, g, or t
  misc_feature (1044)..(1044): n is a, c, g, or t
  misc_feature (1046)..(1046): n is a, c, g, or t
  misc_feature (1050)..(1050): n is a, c, g, or t
  misc_feature (1055)..(1055): n is a, c, g, or t
  misc_feature (1058)..(1058): n is a, c, g, or t
  misc_feature (1061)..(1061): n is a, c, g, or t
  misc_feature (1068)..(1068): n is a, c, g, or t
  misc_feature (1087)..(1087): n is a, c, g, or t
  misc_feature (1099)..(1099): n is a, c, g, or t
  misc_feature (1102)..(1102): n is a, c, g, or t
  misc_feature (1105)..(1105): n is a, c, g, or t
  misc_feature (1117)..(1117): n is a, c, g, or t
  misc_feature (1120)..(1120): n is a, c, g, or t
  misc_feature (1124)..(1124): n is a, c, g, or t
  misc_feature (1127)..(1128): n is a, c, g, or t
  misc_feature (1130)..(1130): n is a, c, g, or t
  misc_feature (1132)..(1133): n is a, c, g, or t
  misc_feature (1137)..(1137): n is a, c, g, or t
  misc_feature (1142)..(1142): n is a, c, g, or t
  misc_feature (1147)..(1147): n is a, c, g, or t
  misc_feature (1165)..(1165): n is a, c, g, or t
agaaattaacnatgagaggatcgcatcaccatcaccatcacggatcctatttaggtgacactatagaatcgtcgacccacgcgtccggcgcgatggagccggggcgccggggggccgcggcgctgctagcgctgctgtgcgtggcctgcgcgctgcgcgccgggcgcgcccaatacgaacgctacagcttccgcagcttcccacgggacgagctgatgccgctcgagtcggcctaccggcacgcgctggacaagtacagcggcgagcactgggccgagagcgtgggctacctggagatcagcctgcggctgcaccgcttgctgcgcgacagcgaggccttctgccaccgcaactgcagcgccgcgccgcagcccgagcccgccgccggcctcgccagctatcccgagctgcgcctcttcgggggcctgctgcgccgcgcgcactgcctcaagcgctgcaagcagggcctgccagccttccgccagtcccagcccagccgcgaggtgctggcggacttccagcgccgcgagccctacaagttcctgcagttcgcttacttcaaggcaaataatctccccaaagccatcgccgctgctcacacctttctactgaagcatcctgatgacgaaatgatgaagaggaacatggcatattataagagcctgcctggtgccgaggactacattaaagacctggaaaccaagtcatatgaaagcctgttcatccgagcagtgcgggcatacaacggtgagaactggagaacatccatcacagacatggagctggcccttcccgacttcttcaaagccttttacnantgtctcgcancctgcganggttccagggagatcaaggacttcaaggatttctacctttccatancanatcattatgtaaaagttctggaatgcaaaatacagtgtgaananaacctcacccnnnttatagnaggctatccggttnaaaanttggggctaccatgtatcatnanttgcagttgnctattaaaanttnaannanctgaaaaatgnancccccttgggnantcanctatntgnttnttttatnaaaaagaaaagttatgcancaaaactggggnatnacnataccaaggganatngggnctnngnannaaanttccnccaanctgaaaatttatttttanggaaccccttcaaa

SEQ ID NO: 136 - DNA, 1325 bp, Homo Sapiens
  misc_feature (855)..(855): n is a, c, g, or t
  misc_feature (868)..(868): n is a, c, g, or t
  misc_feature (891)..(891): n is a, c, g, or t
  misc_feature (912)..(912): n is a, c, g, or t
  misc_feature (921)..(921): n is a, c, g, or t
  misc_feature (945)..(945): n is a, c, g, or t
  misc_feature (954)..(954): n is a, c, g, or t
  misc_feature (969)..(969): n is a, c, g, or t
  misc_feature (978)..(978): n is a, c, g, or t
  misc_feature (985)..(985): n is a, c, g, or t
  misc_feature (1005)..(1005): n is a, c, g, or t
  misc_feature (1016)..(1016): n is a, c, g, or t
  misc_feature (1025)..(1026): n is a, c, g, or t
  misc_feature (1029)..(1029): n is a, c, g, or t
  misc_feature (1031)..(1032): n is a, c, g, or t
  misc_feature (1035)..(1035): n is a, c, g, or t
  misc_feature (1056)..(1056): n is a, c, g, or t
  misc_feature (1063)..(1108): n is a, c, g, or t
  misc_feature (1111)..(1111): n is a, c, g, or t
  misc_feature (1118)..(1118): n is a, c, g, or t
  misc_feature (1123)..(1123): n is a, c, g, or t
  misc_feature (1126)..(1126): n is a, c, g, or t
  misc_feature (1131)..(1131): n is a, c, g, or t
  misc_feature (1133)..(1133): n is a, c, g, or t
  misc_feature (1144)..(1144): n is a, c, g, or t
  misc_feature (1148)..(1150): n is a, c, g, or t
  misc_feature (1161)..(1161): n is a, c, g, or t
  misc_feature (1175)..(1175): n is a, c, g, or t
  misc_feature (1177)..(1177): n is a, c, g, or t
  misc_feature (1179)..(1179): n is a, c, g, or t
  misc_feature (1194)..(1194): n is a, c, g, or t
  misc_feature (1201)..(1201): n is a, c, g, or t
  misc_feature (1205)..(1205): n is a, c, g, or t
  misc_feature (1208)..(1210): n is a, c, g, or t
  misc_feature (1212)..(1212): n is a, c, g, or t
  misc_feature (1215)..(1215): n is a, c, g, or t
  misc_feature (1237)..(1238): n is a, c, g, or t
  misc_feature (1240)..(1242): n is a, c, g, or t
  misc_feature (1245)..(1245): n is a, c, g, or t
  misc_feature (1259)..(1262): n is a, c, g, or t
  misc_feature (1265)..(1265): n is a, c, g, or t
  misc_feature (1268)..(1270): n is a, c, g, or t
  misc_feature (1273)..(1273): n is a, c, g, or t
  misc_feature (1279)..(1280): n is a, c, g, or t
  misc_feature (1282)..(1282): n is a, c, g, or t
  misc_feature (1286)..(1288): n is a, c, g, or t
  misc_feature (1292)..(1294): n is a, c, g, or t
  misc_feature (1298)..(1298): n is a, c, g, or t
  misc_feature (1303)..(1303): n is a, c, g, or t
  misc_feature (1306)..(1307): n is a, c, g, or t
  misc_feature (1309)..(1309): n is a, c, g, or t
  misc_feature (1320)..(1322): n is a, c, g, or t
  misc_feature (1325)..(1325): n is a, c, g, or t
tagagaaattactatgagaggatcgcatcaccatcaccatcacggatcctatttaggtgacactatagaatcgtcgacccacgcgtccgcccacgcgtccgatcatcttcagctaagttgccgaagtccctctccagccctggaggcccctccaagccaaagaagtccaagtcgggccaggatccccagcaggagcaggagcaggagcgggagcgggatccccagcaggagcaggagcgggagcggcccgtggaccgggagcccgtggaccgggagccggtggtgtgccaccccgacctggaggagcggctgcaggcctggccagcggagctgcctgatgagttctttgagctgacggtggacgacgtgagaagacgcttggcccagctcaagagtgagcggaagcgcctggaagaagcccccttggtgaccaaggccttcagggaggcgcagataaaggagaagctggagcgctacccaaaggtggctctgagggtcctgttccccgaccgctacgtcctacagggcttcttccgccccagcgagacagtgggggacttgcgagacttcgtgaggagccacctggggaaccccgagctgtcattttacctgttcatcacccctccaaaaacagtcctggacgaccacacgcagaccctctttcaggcgaacctcttcccggccgctctggtgcacttgggagccgaggagccggcaggtgtctacctggagcctggcctgctggagcatgccatctccccatctgcggccgacgtgctggtggccaggtacatgtccagggccgccgggtccccttccccattgccagcccctgaccctgcacctaagtctganccagctgctgagnagggggcgctggtcccccctgancccatcccagggacggcccancccgtgaanagaacctggggcaaggtgcccaantggctgaanctgccggccaacaanaggtgaaanctgccancctgaggtgcccactccgcnagccaaaggancacctcttnngcnannagnaaaaaaaattgtgcttccttnaaaaaannnnnnnnnnnnnnnnnnnnnnnnnnnnnnnnnnnnnnnnnnnnnnaangggggcnccccnaanggggncnattaacttatntacnnnactgggacccngtttaaaaatccanangncccaaaaccccttgnttttttnaaanctnnntnccncggggtttttttgggaaaaacnncnnnttngggattttttgggnnnnggnctnnnggnaaaaanncngggnnncccnnntatntcccnggnncnaaaaaattttnnnttn

SEQ ID NO: 137 - DNA, 256 bp, Homo Sapiens
  misc_feature (1)..(1): n is a, c, g, or t
naactatgagaggatcgcatcaccatcaccatcacggatcctatttaggtgacactatagaatcgtcgacccacgcgtccgattttagaaaaccaggagagaagaccttcacccaacgaagccgtctttttgtgggaaatcttcctcccgacatcactgaggaagaaatgaggaaactatttgagaaatatggaaaggcaggcgaagtcttcattcataaggataaaggatttggctttatccgcttggaaacccg

SEQ ID NO: 138 - DNA, 1352 bp, Homo Sapiens
  misc_feature (722)..(722): n is a, c, g, or t
  misc_feature (780)..(780): n is a, c, g, or t
  misc_feature (791)..(791): n is a, c, g, or t
  misc_feature (796)..(796): n is a, c, g, or t
  misc_feature (800)..(800): n is a, c, g, or t
  misc_feature (807)..(807): n is a, c, g, or t
  misc_feature (815)..(815): n is a, c, g, or t
  misc_feature (832)..(832): n is a, c, g, or t
  misc_feature (841)..(841): n is a, c, g, or t
  misc_feature (858)..(858): n is a, c, g, or t
  misc_feature (868)..(868): n is a, c, g, or t
  misc_feature (878)..(879): n is a, c, g, or t
  misc_feature (912)..(912): n is a, c, g, or t
  misc_feature (920)..(920): n is a, c, g, or t
  misc_feature (922)..(922): n is a, c, g, or t
  misc_feature (927)..(927): n is a, c, g, or t
  misc_feature (930)..(930): n is a, c, g, or t
  misc_feature (934)..(934): n is a, c, g, or t
  misc_feature (945)..(945): n is a, c, g, or t
  misc_feature (947)..(947): n is a, c, g, or t
  misc_feature (950)..(951): n is a, c, g, or t
  misc_feature (953)..(953): n is a, c, g, or t
  misc_feature (955)..(955): n is a, c, g, or t
  misc_feature (962)..(962): n is a, c, g, or t
  misc_feature (964)..(964): n is a, c, g, or t
  misc_feature (982)..(982): n is a, c, g, or t
  misc_feature (985)..(985): n is a, c, g, or t
  misc_feature (1008)..(1008): n is a, c, g, or t
  misc_feature (1026)..(1026): n is a, c, g, or t
  misc_feature (1032)..(1032): n is a, c, g, or t
  misc_feature (1035)..(1035): n is a, c, g, or t
  misc_feature (1039)..(1039): n is a, c, g, or t
  misc_feature (1046)..(1046): n is a, c, g, or t
  misc_feature (1050)..(1051): n is a, c, g, or t
  misc_feature (1061)..(1061): n is a, c, g, or t
  misc_feature (1069)..(1069): n is a, c, g, or t
  misc_feature (1078)..(1078): n is a, c, g, or t
  misc_feature (1081)..(1081): n is a, c, g, or t
  misc_feature (1083)..(1083): n is a, c, g, or t
  misc_feature (1089)..(1089): n is a, c, g, or t
  misc_feature (1098)..(1098): n is a, c, g, or t
  misc_feature (1101)..(1101): n is a, c, g, or t
  misc_feature (1114)..(1115): n is a, c, g, or t
  misc_feature (1124)..(1124): n is a, c, g, or t
  misc_feature (1138)..(1138): n is a, c, g, or t
  misc_feature (1141)..(1142): n is a, c, g, or t
  misc_feature (1149)..(1149): n is a, c, g, or t
  misc_feature (1153)..(1153): n is a, c, g, or t
  misc_feature (1164)..(1164): n is a, c, g, or t
  misc_feature (1166)..(1166): n is a, c, g, or t
  misc_feature (1175)..(1176): n is a, c, g, or t
  misc_feature (1189)..(1190): n is a, c, g, or t
  misc_feature (1192)..(1192): n is a, c, g, or t
  misc_feature (1195)..(1200): n is a, c, g, or t
  misc_feature (1203)..(1204): n is a, c, g, or t
  misc_feature (1207)..(1214): n is a, c, g, or t
  misc_feature (1217)..(1224): n is a, c, g, or t
  misc_feature (1228)..(1229): n is a, c, g, or t
  misc_feature (1233)..(1234): n is a, c, g, or t
  misc_feature (1252)..(1252): n is a, c, g, or t
  misc_feature (1255)..(1255): n is a, c, g, or t
  misc_feature (1261)..(1262): n is a, c, g, or t
  misc_feature (1265)..(1265): n is a, c, g, or t
  misc_feature (1277)..(1277): n is a, c, g, or t
  misc_feature (1281)..(1281): n is a, c, g, or t
  misc_feature (1284)..(1284): n is a, c, g, or t
  misc_feature (1293)..(1293): n is a, c, g, or t
  misc_feature (1314)..(1314): n is a, c, g, or t
  misc_feature (1328)..(1329): n is a, c, g, or t
  misc_feature (1332)..(1332): n is a, c, g, or t
  misc_feature (1343)..(1343): n is a, c, g, or t
  misc_feature (1347)..(1347): n is a, c, g, or t
  misc_feature (1350)..(1350): n is a, c, g, or t
attagagaaattactatgagaggatcgcatcaccatcaccatcacggatcctatttaggtgacactatagaatcgtcgacccacgcgtccgaaatggaagtgtgggatgtgaaaaactacaaacttatttctaaaccggtggcttctgattctacatattttgcttggtgcccggatggtgagcatattttaacagctacatgtgctcccaggttacgggttaataatggatacaaaatttggcattatactggctctatcttgcacaagtatgatgtgccatcaaatgcagaattatggcaggtttcttggcagccatttttggatggaatatttccagcaaaaacaataacttaccaagcagttccaagtgaagtacccaatgaggaacctaaagttgcaacagcttatagacccccagctttaagaaataaaccaatcaccaattccaaattgcatgaagaggaaccacctcagaatatgaaaccacaatcaggaaacgataagccattatcaaaaacagctcttaaaaatcaaaggaagcatgaagctaagaaagctgcaaagcaggaagcaagaagtgacaagagtccagatttggcacctactcctgccccacagagcacaccacgaaacactgtctctcagtcaatttctggggaccctgagatagacaaaaaaattccagaacctaaaggaagaaactgaaagcaatcgaacanctgaaagaacaagcagcaactggaaaacagctagaaaaaaatcagttgggaaaaaatncaaaaagaacngcccnttcnccagganctgggaanaatttggaattgggtantttaaaganttcccgggaaagcaagnttgatgaccnaaaaatccgnngcaaaccccctccttcgggtaaacccctttggnaaacccananaattnccngggnccccccttaangnccnncnanaattttnanccctttttcccaaaatcnccnaaaggggaaaaattttttaaaanggccctttaaaatggaantttttnccntggnccccccnaaanngggccaaaangggaaaanaaaaaaaanaancncggaanttttttacncancctggccaaattnnaaaaaaagngttctttttttttnggnnggggggnaatnaaccccggganangaaaaaaannctttttttttttnnanaannnnnnaannaannnnnnnnaannnnnnnnaagnngggnncccccccccctggggggncanaaaccnnttnaccggcggggcncccnggnaaaccccanggcccccccaccccccggttntttcaacccccggnnccncgggttttttntggnaancc

SEQ ID NO: 139 - DNA, 1612 bp, Homo Sapiens
  misc_feature (1)..(1): n is a, c, g, or t
  misc_feature (3)..(4): n is a, c, g, or t
  misc_feature (7)..(7): n is a, c, g, or t
  misc_feature (12)..(12): n is a, c, g, or t
  misc_feature (14)..(15): n is a, c, g, or t
  misc_feature (38)..(38): n is a, c, g, or t
  misc_feature (54)..(55): n is a, c, g, or t
  misc_feature (59)..(59): n is a, c, g, or t
  misc_feature (62)..(63): n is a, c, g, or t
  misc_feature (77)..(77): n is a, c, g, or t
  misc_feature (83)..(83): n is a, c, g, or t
  misc_feature (106)..(106): n is a, c, g, or t
  misc_feature (115)..(115): n is a, c, g, or t
  misc_feature (135)..(135): n is a, c, g, or t
  misc_feature (152)..(152): n is a, c, g, or t
  misc_feature (156)..(156): n is a, c, g, or t
  misc_feature (163)..(163): n is a, c, g, or t
  misc_feature (196)..(196): n is a, c, g, or t
  misc_feature (203)..(203): n is a, c, g, or t
  misc_feature (205)..(205): n is a, c, g, or t
  misc_feature (218)..(218): n is a, c, g, or t
  misc_feature (223)..(223): n is a, c, g, or t
  misc_feature (232)..(232): n is a, c, g, or t
  misc_feature (237)..(237): n is a, c, g, or t
  misc_feature (241)..(241): n is a, c, g, or t
  misc_feature (248)..(248): n is a, c, g, or t
  misc_feature (254)..(255): n is a, c, g, or t
  misc_feature (257)..(257): n is a, c, g, or t
  misc_feature (261)..(261): n is a, c, g, or t
  misc_feature (264)..(265): n is a, c, g, or t
  misc_feature (279)..(279): n is a, c, g, or t
  misc_feature (284)..(284): n is a, c, g, or t
  misc_feature (289)..(290): n is a, c, g, or t
  misc_feature (292)..(293): n is a, c, g, or t
  misc_feature (295)..(295): n is a, c, g, or t
  misc_feature (297)..(298): n is a, c, g, or t
  misc_feature (308)..(310): n is a, c, g, or t
  misc_feature (316)..(316): n is a, c, g, or t
  misc_feature (318)..(319): n is a, c, g, or t
  misc_feature (325)..(325): n is a, c, g, or t
  misc_feature (333)..(334): n is a, c, g, or t
  misc_feature (343)..(343): n is a, c, g, or t
  misc_feature (348)..(350): n is a, c, g, or t
  misc_feature (357)..(358): n is a, c, g, or t
  misc_feature (360)..(361): n is a, c, g, or t
  misc_feature (367)..(368): n is a, c, g, or t
  misc_feature (377)..(378): n is a, c, g, or t
  misc_feature (380)..(380): n is a, c, g, or t
  misc_feature (383)..(384): n is a, c, g, or t
  misc_feature (387)..(389): n is a, c, g, or t
  misc_feature (391)..(391): n is a, c, g, or t
  misc_feature (393)..(397): n is a, c, g, or t
  misc_feature (411)..(412): n is a, c, g, or t
  misc_feature (415)..(415): n is a, c, g, or t
  misc_feature (417)..(417): n is a, c, g, or t
  misc_feature (425)..(428): n is a, c, g, or t
  misc_feature (437)..(437): n is a, c, g, or t
  misc_feature (439)..(439): n is a, c, g, or t
  misc_feature (448)..(448): n is a, c, g, or t
  misc_feature (460)..(460): n is a, c, g, or t
  misc_feature (463)..(463): n is a, c, g, or t
  misc_feature (465)..(465): n is a, c, g, or t
  misc_feature (467)..(467): n is a, c, g, or t
  misc_feature (470)..(470): n is a, c, g, or t
  misc_feature (474)..(476): n is a, c, g, or t
  misc_feature (478)..(479): n is a, c, g, or t
  misc_feature (481)..(482): n is a, c, g, or t
  misc_feature (484)..(484): n is a, c, g, or t
  misc_feature (486)..(486): n is a, c, g, or t
  misc_feature (488)..(488): n is a, c, g, or t
  misc_feature (490)..(490): n is a, c, g, or t
  misc_feature (492)..(492): n is a, c, g, or t
  misc_feature (494)..(494): n is a, c, g, or t
  misc_feature (497)..(498): n is a, c, g, or t
  misc_feature (501)..(501): n is a, c, g, or t
  misc_feature (504)..(508): n is a, c, g, or t
  misc_feature (511)..(511): n is a, c, g, or t
  misc_feature (513)..(514): n is a, c, g, or t
  misc_feature (516)..(517): n is a, c, g, or t
  misc_feature (520)..(520): n is a, c, g, or t
  misc_feature (523)..(523): n is a, c, g, or t
  misc_feature (525)..(525): n is a, c, g, or t
  misc_feature (532)..(533): n is a, c, g, or t
  misc_feature (536)..(536): n is a, c, g, or t
  misc_feature (538)..(538): n is a, c, g, or t
  misc_feature (541)..(542): n is a, c, g, or t
  misc_feature (544)..(544): n is a, c, g, or t
  misc_feature (546)..(549): n is a, c, g, or t
  misc_feature (552)..(552): n is a, c, g, or t
  misc_feature (555)..(555): n is a, c, g, or t
  misc_feature (558)..(559): n is a, c, g, or t
  misc_feature (562)..(562): n is a, c, g, or t
  misc_feature (565)..(565): n is a, c, g, or t
  misc_feature (569)..(569): n is a, c, g, or t
  misc_feature (571)..(571): n is a, c, g, or t
  misc_feature (575)..(576): n is a, c, g, or t
  misc_feature (578)..(578): n is a, c, g, or t
  misc_feature (581)..(583): n is a, c, g, or t
  misc_feature (585)..(585): n is a, c, g, or t
  misc_feature (587)..(588): n is a, c, g, or t
  misc_feature (590)..(590): n is a, c, g, or t
  misc_feature (595)..(595): n is a, c, g, or t
  misc_feature (600)..(600): n is a, c, g, or t
  misc_feature (603)..(603): n is a, c, g, or t
  misc_feature (609)..(609): n is a, c, g, or t
  misc_feature (611)..(611): n is a, c, g, or t
  misc_feature (618)..(619): n is a, c, g, or t
  misc_feature (622)..(622): n is a, c, g, or t
  misc_feature (624)..(624): n is a, c, g, or t
  misc_feature (626)..(626): n is a, c, g, or t
  misc_feature (628)..(629): n is a, c, g, or t
  misc_feature (632)..(633): n is a, c, g, or t
  misc_feature (642)..(642): n is a, c, g, or t
  misc_feature (644)..(644): n is a, c, g, or t
  misc_feature (646)..(646): n is a, c, g, or t
  misc_feature (648)..(648): n is a, c, g, or t
  misc_feature (653)..(653): n is a, c, g, or t
  misc_feature (656)..(656): n is a, c, g, or t
  misc_feature (660)..(660): n is a, c, g, or t
  misc_feature (663)..(665): n is a, c, g, or t
  misc_feature (669)..(669): n is a, c, g, or t
  misc_feature (671)..(671): n is a, c, g, or t
  misc_feature (673)..(674): n is a, c, g, or t
  misc_feature (677)..(677): n is a, c, g, or t
  misc_feature (679)..(679): n is a, c, g, or t
  misc_feature (681)..(681): n is a, c, g, or t
  misc_feature (683)..(684): n is a, c, g, or t
  misc_feature (695)..(696): n is a, c, g, or t
  misc_feature (708)..(710): n is a, c, g, or t
  misc_feature (712)..(714): n is a, c, g, or t
  misc_feature (723)..(723): n is a, c, g, or t
  misc_feature (731)..(732): n is a, c, g, or t
  misc_feature (736)..(736): n is a, c, g, or t
  misc_feature (739)..(739): n is a, c, g, or t
  misc_feature (743)..(744): n is a, c, g, or t
  misc_feature (746)..(746): n is a, c, g, or t
  misc_feature (749)..(750): n is a, c, g, or t
  misc_feature (752)..(752): n is a, c, g, or t
  misc_feature (759)..(761): n is a, c, g, or t
  misc_feature (764)..(764): n is a, c, g, or t
  misc_feature (769)..(769): n is a, c, g, or t
  misc_feature (777)..(779): n is a, c, g, or t
  misc_feature (782)..(782): n is a, c, g, or t
  misc_feature (792)..(793): n is a, c, g, or t
  misc_feature (799)..(800): n is a, c, g, or t
  misc_feature (803)..(803): n is a, c, g, or t
  misc_feature (806)..(806): n is a, c, g, or t
  misc_feature (810)..(810): n is a, c, g, or t
  misc_feature (815)..(816): n is a, c, g, or t
  misc_feature (819)..(819): n is a, c, g, or t
  misc_feature (822)..(822): n is a, c, g, or t
  misc_feature (825)..(825): n is a, c, g, or t
  misc_feature (829)..(830): n is a, c, g, or t
  misc_feature (834)..(837): n is a, c, g, or t
  misc_feature (841)..(841): n is a, c, g, or t
  misc_feature (843)..(843): n is a, c, g, or t
  misc_feature (846)..(846): n is a, c, g, or t
  misc_feature (853)..(853): n is a, c, g, or t
  misc_feature (861)..(861): n is a, c, g, or t
  misc_feature (863)..(864): n is a, c, g, or t
  misc_feature (868)..(868): n is a, c, g, or t
  misc_feature (871)..(872): n is a, c, g, or t
  misc_feature (874)..(874): n is a, c, g, or t
  misc_feature (879)..(880): n is a, c, g, or t
  misc_feature (887)..(887): n is a, c, g, or t
  misc_feature (889)..(890): n is a, c, g, or t
  misc_feature (893)..(893): n is a, c, g, or t
  misc_feature (895)..(895): n is a, c, g, or t
  misc_feature (897)..(897): n is a, c, g, or t
  misc_feature (900)..(900): n is a, c, g, or t
  misc_feature (902)..(903): n is a, c, g, or t
  misc_feature (906)..(906): n is a, c, g, or t
  misc_feature (908)..(909): n is a, c, g, or t
  misc_feature (912)..(912): n is a, c, g, or t
  misc_feature (917)..(917): n is a, c, g, or t
  misc_feature (919)..(919): n is a, c, g, or t
  misc_feature (921)..(921): n is a, c, g, or t
  misc_feature (925)..(925): n is a, c, g, or t
  misc_feature (927)..(928): n is a, c, g, or t
  misc_feature (930)..(930): n is a, c, g, or t
  misc_feature (934)..(934): n is a, c, g, or t
  misc_feature (942)..(942): n is a, c, g, or t
  misc_feature (945)..(948): n is a, c, g, or t
  misc_feature (950)..(951): n is a, c, g, or t
  misc_feature (963)..(963): n is a, c, g, or t
  misc_feature (965)..(965): n is a, c, g, or t
  misc_feature (968)..(968): n is a, c, g, or t
  misc_feature (974)..(976): n is a, c, g, or t
  misc_feature (978)..(978): n is a, c, g, or t
  misc_feature (980)..(983): n is a, c, g, or t
  misc_feature (985)..(987): n is a, c, g, or t
  misc_feature (991)..(992): n is a, c, g, or t
  misc_feature (994)..(994): n is a, c, g, or t
  misc_feature (996)..(997): n is a, c, g, or t
  misc_feature (1006)..(1007): n is a, c, g, or t
  misc_feature (1009)..(1009): n is a, c, g, or t
  misc_feature (1011)..(1011): n is a, c, g, or t
  misc_feature (1016)..(1018): n is a, c, g, or t
  misc_feature (1023)..(1023): n is a, c, g, or t
  misc_feature (1027)..(1027): n is a, c, g, or t
  misc_feature (1029)..(1029): n is a, c, g, or t
  misc_feature (1031)..(1031): n is a, c, g, or t
  misc_feature (1034)..(1034): n is a, c, g, or t
  misc_feature (1041)..(1041): n is a, c, g, or t
  misc_feature (1044)..(1044): n is a, c, g, or t
  misc_feature (1047)..(1047): n is a, c, g, or t
  misc_feature (1050)..(1051): n is a, c, g, or t
  misc_feature (1053)..(1059): n is a, c, g, or t
  misc_feature (1069)..(1069): n is a, c, g, or t
  misc_feature (1073)..(1073): n is a, c, g, or t
  misc_feature (1075)..(1075): n is a, c, g, or t
  misc_feature (1077)..(1077): n is a, c, g, or t
  misc_feature (1079)..(1080): n is a, c, g, or t
  misc_feature (1085)..(1085): n is a, c, g, or t
  misc_feature (1088)..(1088): n is a, c, g, or t
  misc_feature (1092)..(1095): n is a, c, g, or t
  misc_feature (1099)..(1102): n is a, c, g, or t
  misc_feature (1104)..(1105): n is a, c, g, or t
  misc_feature (1110)..(1111): n is a, c, g, or t
  misc_feature (1120)..(1120): n is a, c, g, or t
  misc_feature (1129)..(1131): n is a, c, g, or t
  misc_feature (1133)..(1133): n is a, c, g, or t
  misc_feature (1137)..(1137): n is a, c, g, or t
  misc_feature (1143)..(1143): n is a, c, g, or t
  misc_feature (1145)..(1145): n is a, c, g, or t
  misc_feature (1147)..(1147): n is a, c, g, or t
  misc_feature (1149)..(1149): n is a, c, g, or t
  misc_feature (1153)..(1153): n is a, c, g, or t
  misc_feature (1156)..(1156): n is a, c, g, or t
  misc_feature (1159)..(1159): n is a, c, g, or t
  misc_feature (1165)..(1165): n is a, c, g, or t
  misc_feature (1167)..(1168): n is a, c, g, or t
  misc_feature (1177)..(1179): n is a, c, g, or t
  misc_feature (1182)..(1182): n is a, c, g, or t
  misc_feature (1187)..(1188): n is a, c, g, or t
  misc_feature (1194)..(1195): n is a, c, g, or t
  misc_feature (1201)..(1201): n is a, c, g, or t
  misc_feature (1203)..(1203): n is a, c, g, or t
  misc_feature (1205)..(1205): n is a, c, g, or t
  misc_feature (1208)..(1208): n is a, c, g, or t
  misc_feature (1210)..(1210): n is a, c, g, or t
  misc_feature (1213)..(1213): n is a, c, g, or t
  misc_feature (1216)..(1216): n is a, c, g, or t
  misc_feature (1219)..(1219): n is a, c, g, or t
  misc_feature (1223)..(1223): n is a, c, g, or t
  misc_feature (1228)..(1228): n is a, c, g, or t
  misc_feature (1230)..(1231): n is a, c, g, or t
  misc_feature (1236)..(1236): n is a, c, g, or t
  misc_feature (1239)..(1242): n is a, c, g, or t
  misc_feature (1250)..(1250): n is a, c, g, or t
  misc_feature (1252)..(1252): n is a, c, g, or t
  misc_feature (1257)..(1257): n is a, c, g, or t
  misc_feature (1260)..(1265): n is a, c, g, or t
  misc_feature (1268)..(1269): n is a, c, g, or t
  misc_feature (1274)..(1275): n is a, c, g, or t
  misc_feature (1278)..(1278): n is a, c, g, or t
  misc_feature (1284)..(1285): n is a, c, g, or t
  misc_feature (1288)..(1290): n is a, c, g, or t
  misc_feature (1294)..(1294): n is a, c, g, or t
  misc_feature (1300)..(1300): n is a, c, g, or t
  misc_feature (1304)..(1306): n is a, c, g, or t
  misc_feature (1308)..(1309): n is a, c, g, or t
  misc_feature (1312)..(1314): n is a, c, g, or t
  misc_feature (1317)..(1317): n is a, c, g, or t
  misc_feature (1319)..(1319): n is a, c, g, or t
  misc_feature (1322)..(1323): n is a, c, g, or t
  misc_feature (1328)..(1328): n is a, c, g, or t
  misc_feature (1330)..(1330): n is a, c, g, or t
  misc_feature (1333)..(1333): n is a, c, g, or t
  misc_feature (1335)..(1335): n is a, c, g, or t
  misc_feature (1339)..(1340): n is a, c, g, or t
  misc_feature (1343)..(1344): n is a, c, g, or t
  misc_feature (1346)..(1346): n is a, c, g, or t
  misc_feature (1348)..(1348): n is a, c, g, or t
  misc_feature (1350)..(1353): n is a, c, g, or t
  misc_feature (1355)..(1356): n is a, c, g, or t
  misc_feature (1358)..(1358): n is a, c, g, or t
  misc_feature (1362)..(1362): n is a, c, g, or t
  misc_feature (1364)..(1364): n is a, c, g, or t
  misc_feature (1366)..(1368): n is a, c, g, or t
  misc_feature (1375)..(1375): n is a, c, g, or t
  misc_feature (1379)..(1380): n is a, c, g, or t
  misc_feature (1385)..(1386): n is a, c, g, or t
  misc_feature (1394)..(1394): n is a, c, g, or t
  misc_feature (1396)..(1396): n is a, c, g, or t
  misc_feature (1398)..(1398): n is a, c, g, or t
  misc_feature (1404)..(1404): n is a, c, g, or t
  misc_feature (1410)..(1410): n is a, c, g, or t
  misc_feature (1415)..(1415): n is a, c, g, or t
  misc_feature (1417)..(1417): n is a, c, g, or t
  misc_feature (1419)..(1421): n is a, c, g, or t
  misc_feature (1426)..(1426): n is a, c, g, or t
  misc_feature (1434)..(1435): n is a, c, g, or t
  misc_feature (1437)..(1437): n is a, c, g, or t
  misc_feature (1439)..(1439): n is a, c, g, or t
  misc_feature (1443)..(1444): n is a, c, g, or t
  misc_feature (1456)..(1456): n is a, c, g, or t
  misc_feature (1460)..(1460): n is a, c, g, or t
  misc_feature (1462)..(1462): n is a, c, g, or t
  misc_feature (1467)..(1467): n is a, c, g, or t
  misc_feature (1475)..(1475): n is a, c, g, or t
  misc_feature (1477)..(1478): n is a, c, g, or t
  misc_feature (1480)..(1481): n is a, c, g, or t
  misc_feature (1484)..(1484): n is a, c, g, or t
  misc_feature (1487)..(1487): n is a, c, g, or t
  misc_feature (1491)..(1491): n is a, c, g, or t
  misc_feature (1495)..(1495): n is a, c, g, or t
  misc_feature (1497)..(1497): n is a, c, g, or t
  misc_feature (1499)..(1499): n is a, c, g, or t
  misc_feature (1504)..(1504): n is a, c, g, or t
  misc_feature (1506)..(1506): n is a, c, g, or t
  misc_feature (1508)..(1508): n is a, c, g, or t
  misc_feature (1511)..(1512): n is a, c, g, or t
  misc_feature (1516)..(1516): n is a, c, g, or t
  misc_feature (1520)..(1520): n is a, c, g, or t
  misc_feature (1527)..(1528): n is a, c, g, or t
  misc_feature (1531)..(1531): n is a, c, g, or t
  misc_feature (1534)..(1534): n is a, c, g, or t
  misc_feature (1538)..(1538): n is a, c, g, or t
  misc_feature (1543)..(1545): n is a, c, g, or t
  misc_feature (1547)..(1547): n is a, c, g, or t
  misc_feature (1550)..(1551): n is a, c, g, or t
  misc_feature (1554)..(1554): n is a, c, g, or t
  misc_feature (1557)..(1558): n is a, c, g, or t
  misc_feature (1560)..(1560): n is a, c, g, or t
  misc_feature (1562)..(1564): n is a, c, g, or t
  misc_feature (1571)..(1571): n is a, c, g, or t
  misc_feature (1582)..(1582): n is a, c, g, or t
  misc_feature (1591)..(1591): n is a, c, g, or t
  misc_feature (1599)..(1599): n is a, c, g, or t
  misc_feature (1602)..(1602): n is a, c, g, or t
  misc_feature (1606)..(1606): n is a, c, g, or t
ncnncanaatangnngagatattactatgagaggatcncctcaccctcaccatnncggnatnntatttgggtgacanttatanaatcgtccacccacgcgctccgngcctcgcgngggcgtcgttcccgggcggnagctggagacgcgccancggntgcgtgngaccaagagcgggcgccgggagctccgcagagngcggccngncgaggcgggagcncgggntgctggccngatcncgtncaggggncgccgnngngccnctnnccccctgacgcggnccggnccacnntnncnanngcaagggcannnctcccntnngtggcntgcatgannaatagaagnaatcnnnactcggnnannaaagtnnccccatcgnncnggnnaannnanannnnntccactgcccctgnntancntccatggnnnnatccttgtncnaatgcctgnatttcttatgantcntncnatnaacnnntnnannanantncnananctnnaanctnnnnnatncnnannccngantntccactnntantntgnntncnnnncgncanttnnacnatnagtnantttnncnctnnntnanntngtatncttcnccntatctntncacattnnatnanananncannattatattntnantnctcanaantatncannntaantnannccnancntnntcatcattttnnttacatcttgtnnntnnnaaagtattnaaatgtgnntgantanctanncntanngnttcaatnnntcncctantatatatnnnacntttactaatnnttaaannaantanagancattnncanctnttntttnnattnnnnactntnttnctattcntactaaantnnaatnccnntnatcanntgtatananntancnanaantnnatncnntanaaatnancnaaananntnactnaataaatncannnntnnatagataaaatncnatntttaannntntnnnncnnncaannanannttatatctnnancnaatannntaaanaaanantncanctaaagntanctntcnncnnnnnnnaaaaaaattntttnantntnnattantcnttannnnttcnnnncnntattnntttcacatncaattattnnntnttcnacatananantntttnctnttntcactnanntatattttnnntanatatnnaatttnnaagacntntntcncnatnttnttntaanttttntnntttgntannnnctctcttnanttgcntcnnnnnnttnnaattnnttngtcctnnctnnnatcnctttcntttnnncnnctnnnttntnttnnaatcntnaantnaaanntannancnannnntnntntatntntnnnctttatnaacnngaatnncattagtnananctttantatacnaacanantnnnttttnattatctnnantntcanntatcaacatccnctcncntctanccttttantnntnntcnctnaatncatnananccctnantntcnntatntttnattaatnntantantaanttttnnntncannaanatnnancnnntcctcantatacatttantaatcttcntctactanctncttnctttcc

SEQ ID NO: 140 - DNA, 256 bp, Homo Sapiens
  misc_feature (36)..(36): n is a, c, g, or t
  misc_feature (45)..(46): n is a, c, g, or t
  misc_feature (51)..(51): n is a, c, g, or t
  misc_feature (73)..(73): n is a, c, g, or t
cgagaatataaaaaattatttgctttgtgagcgganacatataanngattnattgtgagcggataacaatttncacagaattcattaaagaggagaaattaactatgagaggatcgcatcaccatcaccatcacggatcctatttaggtgacactatagaatcgtcgacccacgcgtccgaggacacagagatgatcctagtggacaggaccctcacagacatctcctttcagagcaatgtgctcttcgctgaggc

SEQ ID NO: 141 - DNA, 1361 bp, Homo Sapiens
  misc_feature (836)..(836): n is a, c, g, or t
  misc_feature (855)..(855): n is a, c, g, or t
  misc_feature (857)..(857): n is a, c, g, or t
  misc_feature (872)..(872): n is a, c, g, or t
  misc_feature (891)..(891): n is a, c, g, or t
  misc_feature (909)..(909): n is a, c, g, or t
  misc_feature (914)..(914): n is a, c, g, or t
  misc_feature (929)..(929): n is a, c, g, or t
  misc_feature (933)..(933): n is a, c, g, or t
  misc_feature (938)..(938): n is a, c, g, or t
  misc_feature (945)..(945): n is a, c, g, or t
  misc_feature (961)..(961): n is a, c, g, or t
  misc_feature (968)..(968): n is a, c, g, or t
  misc_feature (972)..(972): n is a, c, g, or t
  misc_feature (980)..(980): n is a, c, g, or t
  misc_feature (996)..(996): n is a, c, g, or t
  misc_feature (1017)..(1017): n is a, c, g, or t
  misc_feature (1028)..(1028): n is a, c, g, or t
  misc_feature (1033)..(1033): n is a, c, g, or t
  misc_feature (1047)..(1047): n is a, c, g, or t
  misc_feature (1063)..(1063): n is a, c, g, or t
  misc_feature (1077)..(1077): n is a, c, g, or t
  misc_feature (1088)..(1088): n is a, c, g, or t
  misc_feature (1096)..(1096): n is a, c, g, or t
  misc_feature (1120)..(1120): n is a, c, g, or t
  misc_feature (1124)..(1124): n is a, c, g, or t
  misc_feature (1126)..(1126): n is a, c, g, or t
  misc_feature (1131)..(1131): n is a, c, g, or t
  misc_feature (1134)..(1134): n is a, c, g, or t
  misc_feature (1139)..(1139): n is a, c, g, or t
  misc_feature (1143)..(1143): n is a, c, g, or t
  misc_feature (1151)..(1151): n is a, c, g, or t
  misc_feature (1166)..(1166): n is a, c, g, or t
  misc_feature (1168)..(1168): n is a, c, g, or t
  misc_feature (1172)..(1172): n is a, c, g, or t
  misc_feature (1181)..(1181): n is a, c, g, or t
  misc_feature (1183)..(1184): n is a, c, g, or t
  misc_feature (1189)..(1190): n is a, c, g, or t
  misc_feature (1201)..(1201): n is a, c, g, or t
  misc_feature (1214)..(1214): n is a, c, g, or t
  misc_feature (1232)..(1232): n is a, c, g, or t
  misc_feature (1244)..(1244): n is a, c, g, or t
  misc_feature (1247)..(1247): n is a, c, g, or t
  misc_feature (1256)..(1256): n is a, c, g, or t
  misc_feature (1263)..(1263): n is a, c, g, or t
  misc_feature (1275)..(1275): n is a, c, g, or t
  misc_feature (1280)..(1280): n is a, c, g, or t
  misc_feature (1283)..(1283): n is a, c, g, or t
  misc_feature (1287)..(1287): n is a, c, g, or t
  misc_feature (1291)..(1291): n is a, c, g, or t
  misc_feature (1298)..(1298): n is a, c, g, or t
  misc_feature (1300)..(1304): n is a, c, g, or t
  misc_feature (1307)..(1307): n is a, c, g, or t
  misc_feature (1310)..(1313): n is a, c, g, or t
  misc_feature (1316)..(1316): n is a, c, g, or t
  misc_feature (1319)..(1319): n is a, c, g, or t
  misc_feature (1321)..(1322): n is a, c, g, or t
  misc_feature (1324)..(1325): n is a, c, g, or t
  misc_feature (1327)..(1327): n is a, c, g, or t
  misc_feature (1332)..(1332): n is a, c, g, or t
  misc_feature (1335)..(1337): n is a, c, g, or t
  misc_feature (1341)..(1341): n is a, c, g, or t
  misc_feature (1344)..(1344): n is a, c, g, or t
  misc_feature (1351)..(1355): n is a, c, g, or t
  misc_feature (1358)..(1358): n is a, c, g, or t
gagagaattactatgagaggatcgcatcaccatcaccatcacggatcctatttaggtgacactatagaatcgtcgacccacgcgtccggacacagcagcacaccagaccacaccagcacactggagcctcctcgtttgcctcaaagaaagaacttacaaagtgaaaaggaaacttatcagctgtctaaggaagtggaaattttatctaggaacctggttgaaatgcaacggtgtctttctgaacttacaaaccgtctgcataatgggaagaaatcctcttcagtgtatccactctctcaagatcttccttatgttcacatcatttaccagaaaccttattatctaggtcctgttgttgaaaaaagagcggtgcttctctgtgatggtaaactaaggctcagtacagttcagcagacttttggcctttctctcattgaaatgctacatgattcccactggattcttctctctgctgacagtgagggctttatcccgttaaccttcacagccacacaggaaataatcataagagatggcagcctgtccaggtcagatgtcttcagagactctttttctcacagtccaggtgctgtttcttctcttaaagtctttacaggccttgctgcccccagtttagataccactggctgttgtaaccatgtagatggcatggcttgatatctgcagtgtccttgctgtgtagctcttcagatgagaccattacaaacaaggcctgcttgacactggacactcgccaatgagactcccactgcactcaggcgaagcgcttgccatggtcggctctcctggtttccccctgtttcccctgagctgangctcgctgctgtgtagcananctcagtctttattanatggctccgaaagtggtgnttatgtattcatgactgngtggntttgactaagggcanaatnctcanaacaaancaatattatggggccntatggangggntttatggnttctctgaggctttgngtcccttgtccaagctgcatngaagctgtctnagganccttaaaaaaaccntggcatggttaaaggnctttttctgggctncaaaagaggtngagaatcngctgggggctgggccctaccaatnaccncnacccncanaattncaanccccaggngaccaaaaccctggntntgcnccagaaagnannggccnnagtgccggacnccaaattaacaancccttgttcttaaaattnggggaaaaggcnggnacttaaaanggccggnaatttaaaaatnagganttncccngggncctgggngnnnnnccnccnnnnccnaancnngnntnggggnccnnngccnaanttttttnnnnnggnccc

SEQ ID NO: 142 - DNA, 256 bp, Homo Sapiens
ccacgcgtccgggaaggggaagagaagtccagccgccaagcccagccttccccggcgcgcagccccgacggggccgcggcaggcgcggcgagagcgctgacggagccatgagagagtacaaagtggtggtgctgggctcgggcggcgtgggcaagtccgcgctcaccgtgcagttcgtgacgggctccttcatcgagaagtacgacccgaccatcgaagacttttaccgcaaggagattgaggtggactcgtcgcc

SEQ ID NO: 143 - DNA, 1635 bp, Homo Sapiens
  misc_feature (7)..(10): n is a, c, g, or t
  misc_feature (13)..(13): n is a, c, g, or t
  misc_feature (17)..(17): n is a, c, g, or t
  misc_feature (26)..(26): n is a, c, g, or t
  misc_feature (29)..(29): n is a, c, g, or t
  misc_feature (38)..(39): n is a, c, g, or t
  misc_feature (46)..(46): n is a, c, g, or t
  misc_feature (57)..(57): n is a, c, g, or t
  misc_feature (63)..(63): n is a, c, g, or t
  misc_feature (69)..(69): n is a, c, g, or t
  misc_feature (76)..(76): n is a, c, g, or t
  misc_feature (84)..(84): n is a, c, g, or t
  misc_feature (102)..(102): n is a, c, g, or t
  misc_feature (120)..(120): n is a, c, g, or t
  misc_feature (127)..(127): n is a, c, g, or t
  misc_feature (135)..(135): n is a, c, g, or t
  misc_feature (140)..(140): n is a, c, g, or t
  misc_feature (142)..(142): n is a, c, g, or t
  misc_feature (148)..(148): n is a, c, g, or t
  misc_feature (150)..(150): n is a, c, g, or t
  misc_feature (161)..(161): n is a, c, g, or t
  misc_feature (164)..(164): n is a, c, g, or t
  misc_feature (177)..(177): n is a, c, g, or t
  misc_feature (179)..(179): n is a, c, g, or t
  misc_feature (187)..(188): n is a, c, g, or t
  misc_feature (190)..(190): n is a, c, g, or t
  misc_feature (199)..(199): n is a, c, g, or t
  misc_feature (204)..(204): n is a, c, g, or t
  misc_feature (206)..(207): n is a, c, g, or t
  misc_feature (209)..(209): n is a, c, g, or t
  misc_feature (216)..(217): n is a, c, g, or t
  misc_feature (220)..(222): n is a, c, g, or t
  misc_feature (247)..(247): n is a, c, g, or t
  misc_feature (251)..(251): n is a, c, g, or t
  misc_feature (253)..(253): n is a, c, g, or t
  misc_feature (270)..(270): n is a, c, g, or t
  misc_feature (274)..(274): n is a, c, g, or t
  misc_feature (277)..(277): n is a, c, g, or t
  misc_feature (279)..(281): n is a, c, g, or t
  misc_feature (285)..(285): n is a, c, g, or t
  misc_feature (293)..(294): n is a, c, g, or t
  misc_feature (304)..(304): n is a, c, g, or t
  misc_feature (306)..(306): n is a, c, g, or t
  misc_feature (310)..(310): n is a, c, g, or t
  misc_feature (313)..(313): n is a, c, g, or t
  misc_feature (331)..(331): n is a, c, g, or t
  misc_feature (334)..(334): n is a, c, g, or t
  misc_feature (336)..(336): n is a, c, g, or t
  misc_feature (353)..(353): n is a, c, g, or t
  misc_feature (356)..(356): n is a, c, g, or t
  misc_feature (359)..(359): n is a, c, g, or t
  misc_feature (372)..(373): n is a, c, g, or t
  misc_feature (380)..(380): n is a, c, g, or t
  misc_feature (382)..(382): n is a, c, g, or t
  misc_feature (384)..(384): n is a, c, g, or t
  misc_feature (387)..(387): n is a, c, g, or t
  misc_feature (394)..(394): n is a, c, g, or t
  misc_feature (408)..(409): n is a, c, g, or t
  misc_feature (411)..(411): n is a, c, g, or t
  misc_feature (414)..(414): n is a, c, g, or t
  misc_feature (418)..(418): n is a, c, g, or t
  misc_feature (425)..(426): n is a, c, g, or t
  misc_feature (430)..(430): n is a, c, g, or t
  misc_feature (442)..(442): n is a, c, g, or t
  misc_feature (456)..(456): n is a, c, g, or t
  misc_feature (458)..(458): n is a, c, g, or t
  misc_feature (461)..(461): n is a, c, g, or t
  misc_feature (469)..(470): n is a, c, g, or t
  misc_feature (472)..(473): n is a, c, g, or t
  misc_feature (475)..(476): n is a, c, g, or t
  misc_feature (480)..(481): n is a, c, g, or t
  misc_feature (484)..(484): n is a, c, g, or t
  misc_feature (502)..(502): n is a, c, g, or t
  misc_feature (507)..(508): n is a, c, g, or t
  misc_feature (510)..(511): n is a, c, g, or t
  misc_feature (520)..(520): n is a, c, g, or t
  misc_feature (522)..(522): n is a, c, g, or t
  misc_feature (525)..(525): n is a, c, g, or t
  misc_feature (529)..(529): n is a, c, g, or t
  misc_feature (540)..(540): n is a, c, g, or t
  misc_feature (550)..(550): n is a, c, g, or t
  misc_feature (553)..(553): n is a, c, g, or t
  misc_feature (563)..(563): n is a, c, g, or t
  misc_feature (572)..(572): n is a, c, g, or t
  misc_feature (578)..(580): n is a, c, g, or t
  misc_feature (582)..(582): n is a, c, g, or t
  misc_feature (588)..(590): n is a, c, g, or t
  misc_feature (594)..(598): n is a, c, g, or t
  misc_feature (600)..(600): n is a, c, g, or t
  misc_feature (602)..(602): n is a, c, g, or t
  misc_feature (608)..(608): n is a, c, g, or t
  misc_feature (610)..(610): n is a, c, g, or t
  misc_feature (612)..(612): n is a, c, g, or t
  misc_feature (615)..(615): n is a, c, g, or t
  misc_feature (617)..(617): n is a, c, g, or t
  misc_feature (619)..(619): n is a, c, g, or t
  misc_feature (628)..(628): n is a, c, g, or t
  misc_feature (641)..(641): n is a, c, g, or t
  misc_feature (655)..(655): n is a, c, g, or t
  misc_feature (658)..(658): n is a, c, g, or t
  misc_feature (660)..(661): n is a, c, g, or t
  misc_feature (669)..(669): n is a, c, g, or t
  misc_feature (674)..(674): n is a, c, g, or t
  misc_feature (677)..(678): n is a, c, g, or t
  misc_feature (681)..(681): n is a, c, g, or t
  misc_feature (685)..(686): n is a, c, g, or t
  misc_feature (699)..(699): n is a, c, g, or t
  misc_feature (702)..(703): n is a, c, g, or t
  misc_feature (705)..(705): n is a, c, g, or t
  misc_feature (709)..(709): n is a, c, g, or t
  misc_feature (727)..(727): n is a, c, g, or t
  misc_feature (730)..(730): n is a, c, g, or t
  misc_feature (742)..(744): n is a, c, g, or t
  misc_feature (748)..(748): n is a, c, g, or t
  misc_feature (763)..(763): n is a, c, g, or t
  misc_feature (770)..(770): n is a, c, g, or t
  misc_feature (772)..(772): n is a, c, g, or t
  misc_feature (776)..(776): n is a, c, g, or t
  misc_feature (780)..(781): n is a, c, g, or t
  misc_feature (783)..(784): n is a, c, g, or t
  misc_feature (787)..(787): n is a, c, g, or t
  misc_feature (789)..(789): n is a, c, g, or t
  misc_feature (794)..(794): n is a, c, g, or t
  misc_feature (799)..(799): n is a, c, g, or t
  misc_feature (804)..(804): n is a, c, g, or t
  misc_feature (811)..(812): n is a, c, g, or t
  misc_feature (816)..(817): n is a, c, g, or t
  misc_feature (822)..(822): n is a, c, g, or t
  misc_feature (826)..(826): n is a, c, g, or t
  misc_feature (832)..(832): n is a, c, g, or t
  misc_feature (839)..(839): n is a, c, g, or t
  misc_feature (853)..(853): n is a, c, g, or t
  misc_feature (863)..(863): n is a, c, g, or t
  misc_feature (874)..(875): n is a, c, g, or t
  misc_feature (878)..(878): n is a, c, g, or t
  misc_feature (887)..(887): n is a, c, g, or t
  misc_feature (892)..(892): n is a, c, g, or t
  misc_feature (901)..(901): n is a, c, g, or t
  misc_feature (909)..(910): n is a, c, g, or t
  misc_feature (912)..(912): n is a, c, g, or t
  misc_feature (917)..(918): n is a, c, g, or t
  misc_feature (923)..(923): n is a, c, g, or t
  misc_feature (926)..(926): n is a, c, g, or t
  misc_feature (934)..(934): n is a, c, g, or t
  misc_feature (937)..(937): n is a, c, g, or t
  misc_feature (939)..(939): n is a, c, g, or t
  misc_feature (944)..(944): n is a, c, g, or t
  misc_feature (946)..(947): n is a, c, g, or t
  misc_feature (952)..(952): n is a, c, g, or t
  misc_feature (962)..(963): n is a, c, g, or t
  misc_feature (967)..(968): n is a, c, g, or t
  misc_feature (983)..(983): n is a, c, g, or t
  misc_feature (986)..(986): n is a, c, g, or t
  misc_feature (990)..(993): n is a, c, g, or t
  misc_feature (1001)..(1002): n is a, c, g, or t
  misc_feature (1007)..(1008): n is a, c, g, or t
  misc_feature (1014)..(1014): n is a, c, g, or t
  misc_feature (1021)..(1021): n is a, c, g, or t
  misc_feature (1027)..(1027): n is a, c, g, or t
  misc_feature (1029)..(1029): n is a, c, g, or t
  misc_feature (1033)..(1033): n is a, c, g, or t
  misc_feature (1039)..(1039): n is a, c, g, or t
  misc_feature (1041)..(1041): n is a, c, g, or t
  misc_feature (1044)..(1044): n is a, c, g, or t
  misc_feature (1051)..(1052): n is a, c, g, or t
  misc_feature (1063)..(1063): n is a, c, g, or t
  misc_feature (1065)..(1065): n is a, c, g, or t
  misc_feature (1069)..(1069): n is a, c, g, or t
  misc_feature (1074)..(1074): n is a, c, g, or t
  misc_feature (1076)..(1078): n is a, c, g, or t
  misc_feature (1082)..(1082): n is a, c, g, or t
  misc_feature (1088)..(1089): n is a, c, g, or t
  misc_feature (1096)..(1096): n is a, c, g, or t
  misc_feature (1101)..(1101): n is a, c, g, or t
  misc_feature (1103)..(1103): n is a, c, g, or t
  misc_feature (1106)..(1106): n is a, c, g, or t
  misc_feature (1115)..(1116): n is a, c, g, or t
  misc_feature (1118)..(1119): n is a, c, g, or t
  misc_feature (1122)..(1124): n is a, c, g, or t
  misc_feature (1131)..(1132): n is a, c, g, or t
  misc_feature (1139)..(1139): n is a, c, g, or t
  misc_feature (1142)..(1143): n is a, c, g, or t
  misc_feature (1149)..(1149): n is a, c, g, or t
  misc_feature (1155)..(1155): n is a, c, g, or t
  misc_feature (1157)..(1157): n is a, c, g, or t
  misc_feature (1163)..(1163): n is a, c, g, or t
  misc_feature (1175)..(1176): n is a, c, g, or t
  misc_feature (1182)..(1182): n is a, c, g, or t
  misc_feature (1192)..(1193): n is a, c, g, or t
  misc_feature (1195)..(1196): n is a, c, g, or t
  misc_feature (1198)..(1198): n is a, c, g, or t
  misc_feature (1206)..(1206): n is a, c, g, or t
  misc_feature (1210)..(1210): n is a, c, g, or t
  misc_feature (1212)..(1212): n is a, c, g, or t
  misc_feature (1215)..(1215): n is a, c, g, or t
  misc_feature (1219)..(1219): n is a, c, g, or t
  misc_feature (1225)..(1225): n is a, c, g, or t
  misc_feature (1227)..(1227): n is a, c, g, or t
  misc_feature (1231)..(1233): n is a, c, g, or t
  misc_feature (1240)..(1240): n is a, c, g, or t
  misc_feature (1243)..(1243): n is a, c, g, or t
  misc_feature (1245)..(1246): n is a, c, g, or t
  misc_feature (1248)..(1249): n is a, c, g, or t
  misc_feature (1257)..(1257): n is a, c, g, or t
  misc_feature (1262)..(1262): n is a, c, g, or t
  misc_feature (1267)..(1267): n is a, c, g, or t
  misc_feature (1276)..(1276): n is a, c, g, or t
  misc_feature (1279)..(1281): n is a, c, g, or t
  misc_feature (1285)..(1285): n is a, c, g, or t
  misc_feature (1287)..(1287): n is a, c, g, or t
  misc_feature (1289)..(1291): n is a, c, g, or t
  misc_feature (1293)..(1294): n is a, c, g, or t
  misc_feature (1297)..(1299): n is a, c, g, or t
  misc_feature (1304)..(1304): n is a, c, g, or t
  misc_feature (1310)..(1311): n is a, c, g, or t
  misc_feature (1313)..(1313): n is a, c, g, or t
  misc_feature (1318)..(1318): n is a, c, g, or t
  misc_feature (1320)..(1320): n is a, c, g, or t
  misc_feature (1325)..(1325): n is a, c, g, or t
  misc_feature (1329)..(1329): n is a, c, g, or t
  misc_feature (1336)..(1336): n is a, c, g, or t
  misc_feature (1338)..(1338): n is a, c, g, or t
  misc_feature (1341)..(1344): n is a, c, g, or t
  misc_feature (1348)..(1349): n is a, c, g, or t
  misc_feature (1351)..(1352): n is a, c, g, or t
  misc_feature (1355)..(1356): n is a, c, g, or t
  misc_feature (1364)..(1365): n is a, c, g, or t
  misc_feature (1370)..(1370): n is a, c, g, or t
  misc_feature (1374)..(1374): n is a, c, g, or t
  misc_feature (1380)..(1380): n is a, c, g, or t
  misc_feature (1383)..(1384): n is a, c, g, or t
  misc_feature (1386)..(1388): n is a, c, g, or t
  misc_feature (1398)..(1399): n is a, c, g, or t
  misc_feature (1401)..(1402): n is a, c, g, or t
  misc_feature (1404)..(1404): n is a, c, g, or t
  misc_feature (1407)..(1407): n is a, c, g, or t
  misc_feature (1413)..(1413): n is a, c, g, or t
  misc_feature (1426)..(1426): n is a, c, g, or t
  misc_feature (1436)..(1437): n is a, c, g, or t
  misc_feature (1440)..(1440): n is a, c, g, or t
  misc_feature (1447)..(1447): n is a, c, g, or t
  misc_feature (1454)..(1454): n is a, c, g, or t
  misc_feature (1462)..(1462): n is a, c, g, or t
  misc_feature (1489)..(1489): n is a, c, g, or t
  misc_feature (1493)..(1493): n is a, c, g, or t
  misc_feature (1495)..(1495): n is a, c, g, or t
  misc_feature (1504)..(1504): n is a, c, g, or t
  misc_feature (1506)..(1506): n is a, c, g, or t
  misc_feature (1508)..(1509): n is a, c, g, or t
  misc_feature (1514)..(1514): n is a, c, g, or t
  misc_feature (1517)..(1518): n is a, c, g, or t
  misc_feature (1528)..(1528): n is a, c, g, or t
  misc_feature (1531)..(1532): n is a, c, g, or t
  misc_feature (1537)..(1538): n is a, c, g, or t
  misc_feature (1548)..(1548): n is a, c, g, or t
  misc_feature (1554)..(1554): n is a, c, g, or t
  misc_feature (1559)..(1560): n is a, c, g, or t
  misc_feature (1562)..(1562): n is a, c, g, or t
  misc_feature (1566)..(1568): n is a, c, g, or t
  misc_feature (1571)..(1572): n is a, c, g, or t
  misc_feature (1574)..(1574): n is a, c, g, or t
  misc_feature (1576)..(1576): n is a, c, g, or t
  misc_feature (1579)..(1579): n is a, c, g, or t
  misc_feature (1585)..(1585): n is a, c, g, or t
  misc_feature (1590)..(1590): n is a, c, g, or t
  misc_feature (1596)..(1596): n is a, c, g, or t
  misc_feature (1608)..(1608): n is a, c, g, or t
  misc_feature (1612)..(1612): n is a, c, g, or t
  misc_feature (1622)..(1622): n is a, c, g, or t
  misc_feature (1631)..(1635): n is a, c, g, or t
gaaaaannnnggnaaantttctgtgnggngggggtctnncttctcncctctcccctntcgggnatctcnatttttnaggggtgnacatataataaaatctcnctcacaccacagcggctntccggcnataggtcnaaggngnggcacntngctgttacgcnacncgaggggcggagnangtttcccnncncggcccctngcccncnngnctgtgcnnatnnnatgtatgccgaccctactgacgagnatangnctaaaacgcagataaangacnagnannngttncaatgccnngaactgctcnantgcnggntgcaggtgggggcccccnagnangaggacgaagaggagcnagnacncggtcctgttggnntaggccnangncgnggctgcntgctggatgctctnntnccncggnctctctnnttgnccaagctttccncgacctccgctccnanganttccacannanncnnaacnnctnagatgctattagtcatgnactanncnntcttactgntntgnctcnttgacgaactntattcatatnttnaggttttttnactaaaaanttgcannntnaaacannncttnnnnntntnagtttnanantgntntnttactttantccctttggaatnatccctgcatgaanttnanngttcaagntgtcnaanngantganngacaatatctttnatnnantatngtacgatacattttaaantcnaaaattcctggnnntatnatctcgtgttgttantgtaaanantggnaacnntnnttnanagtcntcaanctaanttctttnnaaanncatanttanggatgnattcaanatttcttcggtaangacctttttnagaaattcttnnttngcattattnataanctccttcanaaaaggannanttttnnaaatnccntcttttcnaantnctttnannatccnacctctttgnnctgnnaaaaaattaaagaanttnatannnnaaattatnntaacnnaatttnaataaancaattngncctntttttntnatnaaaaggnncagtgttcatntntgtnagttncnnnttgnttaaanngacatanaattntnaancttttctcnncnnaannnccataanngttcctntcnntaaaantggaancnctaaantattttttgtanncactanataatttttnntnnanaaagaatntttntnacngttngtcttnantccnnntatgcgnttncnntnnatttatanaggtncaccnaacaattcnttnnntaantnannntnncannnggtancctctnnanccagncntattntttnaaataanangtnnnnttgnncnnctnnccagctcnnttatntatntttagnttnntnnnatctcttgannannanatnaccttnttctaaatatcanctgtaatctnnccncaaatangatctantctattanaatataccttgtggtattgtaaaaaanaaantntttatatcngntnncatanttnngtaacatatnatnnacttnnataatatttnatttcntattnncnaaannnttnncntntantataancacanaatcgntacatattacanttcnatatataacnactactatnnnnn

SEQ ID NO: 144 - DNA, 1426 bp, Homo Sapiens
  misc_feature (2)..(2): n is a, c, g, or t
  misc_feature (103)..(103): n is a, c, g, or t
  misc_feature (618)..(618): n is a, c, g, or t
  misc_feature (709)..(709): n is a, c, g, or t
  misc_feature (761)..(761): n is a, c, g, or t
  misc_feature (781)..(781): n is a, c, g, or t
  misc_feature (807)..(807): n is a, c, g, or t
  misc_feature (859)..(859): n is a, c, g, or t
  misc_feature (868)..(868): n is a, c, g, or t
  misc_feature (886)..(886): n is a, c, g, or t
  misc_feature (889)..(889): n is a, c, g, or t
  misc_feature (893)..(893): n is a, c, g, or t
  misc_feature (896)..(896): n is a, c, g, or t
  misc_feature (912)..(912): n is a, c, g, or t
  misc_feature (916)..(916): n is a, c, g, or t
  misc_feature (951)..(951): n is a, c, g, or t
  misc_feature (957)..(957): n is a, c, g, or t
  misc_feature (962)..(962): n is a, c, g, or t
  misc_feature (967)..(967): n is a, c, g, or t
  misc_feature (976)..(976): n is a, c, g, or t
  misc_feature (981)..(981): n is a, c, g, or t
  misc_feature (985)..(985): n is a, c, g, or t
  misc_feature (996)..(996): n is a, c, g, or t
  misc_feature (998)..(998): n is a, c, g, or t
  misc_feature (1005)..(1006): n is a, c, g, or t
  misc_feature (1009)..(1009): n is a, c, g, or t
  misc_feature (1013)..(1013): n is a, c, g, or t
  misc_feature (1019)..(1019): n is a, c, g, or t
  misc_feature (1022)..(1022): n is a, c, g, or t
  misc_feature (1028)..(1028): n is a, c, g, or t
  misc_feature (1030)..(1030): n is a, c, g, or t
  misc_feature (1039)..(1040): n is a, c, g, or t
  misc_feature (1057)..(1057): n is a, c, g, or t
  misc_feature (1063)..(1063): n is a, c, g, or t
  misc_feature (1066)..(1066): n is a, c, g, or t
  misc_feature (1075)..(1075): n is a, c, g, or t
  misc_feature (1081)..(1082): n is a, c, g, or t
  misc_feature (1094)..(1094): n is a, c, g, or t
  misc_feature (1097)..(1097): n is a, c, g, or t
  misc_feature (1100)..(1100): n is a, c, g, or t
  misc_feature (1105)..(1105): n is a, c, g, or t
  misc_feature (1109)..(1109): n is a, c, g, or t
  misc_feature (1117)..(1117): n is a, c, g, or t
  misc_feature (1126)..(1126): n is a, c, g, or t
  misc_feature (1130)..(1130): n is a, c, g, or t
  misc_feature (1133)..(1134): n is a, c, g, or t
  misc_feature (1137)..(1137): n is a, c, g, or t
  misc_feature (1139)..(1140): n is a, c, g, or t
  misc_feature (1142)..(1142): n is a, c, g, or t
  misc_feature (1153)..(1154): n is a, c, g, or t
  misc_feature (1159)..(1160): n is a, c, g, or t
  misc_feature (1163)..(1163): n is a, c, g, or t
  misc_feature (1170)..(1170): n is a, c, g, or t
  misc_feature (1194)..(1194): n is a, c, g, or t
  misc_feature (1197)..(1198): n is a, c, g, or t
  misc_feature (1200)..(1201): n is a, c, g, or t
  misc_feature (1205)..(1205): n is a, c, g, or t
  misc_feature (1209)..(1209): n is a, c, g, or t
  misc_feature (1212)..(1212): n is a, c, g, or t
  misc_feature (1223)..(1223): n is a, c, g, or t
  misc_feature (1225)..(1226): n is a, c, g, or t
  misc_feature (1232)..(1232): n is a, c, g, or t
  misc_feature (1234)..(1234): n is a, c, g, or t
  misc_feature (1242)..(1242): n is a, c, g, or t
  misc_feature (1247)..(1250): n is a, c, g, or t
  misc_feature (1257)..(1257): n is a, c, g, or t
  misc_feature (1265)..(1265): n is a, c, g, or t
  misc_feature (1275)..(1275): n is a, c, g, or t
  misc_feature (1288)..(1288): n is a, c, g, or t
  misc_feature (1291)..(1291): n is a, c, g, or t
  misc_feature (1294)..(1294): n is a, c, g, or t
  misc_feature (1299)..(1299): n is a, c, g, or t
  misc_feature (1306)..(1306): n is a, c, g, or t
  misc_feature (1318)..(1318): n is a, c, g, or t
  misc_feature (1326)..(1327): n is a, c, g, or t
  misc_feature (1330)..(1330): n is a, c, g, or t
  misc_feature (1335)..(1335): n is a, c, g, or t
  misc_feature (1337)..(1337): n is a, c, g, or t
  misc_feature (1342)..(1343): n is a, c, g, or t
  misc_feature (1346)..(1346): n is a, c, g, or t
  misc_feature (1352)..(1352): n is a, c, g, or t
  misc_feature (1355)..(1355): n is a, c, g, or t
  misc_feature (1359)..(1359): n is a, c, g, or t
  misc_feature (1367)..(1367): n is a, c, g, or t
  misc_feature (1374)..(1374): n is a, c, g, or t
  misc_feature (1377)..(1379): n is a, c, g, or t
  misc_feature (1386)..(1386): n is a, c, g, or t
  misc_feature (1388)..(1388): n is a, c, g, or t
  misc_feature (1391)..(1391): n is a, c, g, or t
  misc_feature (1413)..(1414): n is a, c, g, or t
anaaagagaaattactatgagaggatcgcatcaccattcaccatcacggatcctatttaggtgacactatagaatcgtcgacccacgcgttccgcccacgcgntccggtgcagaccgtactccatccctccctgtgagcaccacgtcaacggctcccggcccccatgcacgggggagggagatacccccaagtgtagcaagatctgtgagcctggctacagcccgacctacaaacaggacaagcactacggatacaattcctacagcgtctccaatagcgagaaggacatcatggccgagatctacaaaaacggccccgtggagggagctttctctgtgtattcggacttcctgctctacaagtcaggagtgtaccaacacgtcaccggagagatgatgggtggccatgccatccgcatcctgggctggggagtggagaatggcacaccctactggctggttgccaactcctggaacactgactggggtgacaatggcttctttaaaatactcagaggacaggatcactgtggaatcgaatcagaagtggtggctggaattccacgcaccgatcagtactgggaaaagatctaatctgccgtgggcctgtcgtgccantcctgggggcgagatcggggtagaaatgcattttattctttaagttcacgtaagatacaagtttcaggcagggtctgaaggactggattgnccaaacatcagacctgtcttccaaggagaccaaagtcctggctacatcccancctgtggttacagtgcatanaaggccatgtgaagccaccgctgccngcacagaacgtccttccccctgtagactaattgcccgtaaggaagtacctgntgcccccanctggattgtggccccctncgntganccnttccatctccagggancaanaacaaatactcatggaattggaaaaccggaattcnttaaancgaanaaaantttcccccnatcantttncccccaaatancntccaaannaantaancttttnccnattttntnccaaaattnnaaaggaaaaaattggtntttggnaanccctttttnaaaaanncacagttttccnaanccnccttnaatntttttaanttttgaatnttcncannccncnntnaattttgtgcnnaaaannganttctttnaaaaaaatttttatttttttcttnacnntnngccnaatnatngggggtaaacncnntgaaantnacgtaaanctgtnnnnatttttnaaaaatgncccctaaaancacccgtcataanaanatnaaagntctcatnaaattttttttnccctcttnnttnctatnanaagtnnatnttattnaanaacntccttttnttattcnaannncatctcncnatntcattaaataaaaagtctatanncaaagattccca

SEQ ID NO: 145 - DNA, 256 bp, Homo Sapiens
  misc_feature (1)..(2): n is a, c, g, or t
  misc_feature (4)..(4): n is a, c, g, or t
nncntcaccatcacggatcctatttaggtgacactatagaatcgtcgacccacgcgtccgctgctggccagtccacccctagtccccacctggtgccttcacctgccccatctccagggcctggtccggtaccccctcgccccccagcagcagaaccacccccttgcctgcgccgaggcgccgcagctgcagacctgctctcctccagcccggagagccagcatggcggcactcagtctcctgggggtgggcagcc

SEQ ID NO: 146 - DNA, 256 bp, Homo Sapiens
  misc_feature (4)..(4): n is a, c, g, or t
ttanctatgagaggatcgcatcaccatcaccatcacggatcctatttaggtgacactatagaatcgtcgacccacgcgtccggccagaagcagcctcaagatgcatctcctccgccaaaagaatgtgaccaaggaactctcagtgcatccctaaatccgagtaattcagagagtagtccttccagatgcccttcagacccagactccacctcccagccaaggtcaggggactctgcagatgtagctagagatgtaa

SEQ ID NO: 147 - DNA, 852 bp, Homo Sapiens
  misc_feature (788)..(789): n is a, c, g, or t
  misc_feature (791)..(791): n is a, c, g, or t
  misc_feature (795)..(798): n is a, c, g, or t
  misc_feature (800)..(852): n is a, c, g, or t
gagaaattactatgagaggatcgcatcaccatcaccatcacggatcctatttaggtgacactatagaatcgtcgacccacgcgtccgcccacgcgtccgcggacgcgtgggcaaattatgctgcagcatattgtactggcctgctgctggcccgcaggcttctcaataggtttggcatggacaagatctatgaaggccaagtggaggtgactggtgatgaatacaatgtggaaagcattgatggtcagccaggtgccttcacctgctatttggatgcaggccttgccagaactaccactggcaataaagtttttggtgccctgaagggagctgtggatggaggcttgtctatccctcacagtaccaaacgattccctggttatgattctgaaagcaaggaatttaatgcagaagtacatcggaagcacatcatgggccagaatgttgcagattacatgcgctacttaatggaagaagatgaagatgcttacaagaaacagttctctcaatacataaagaacagcgtaactccagacatgatggaggagatgtataagaaagctcatgctgctatacgagagaatccagtctatgaaaagaagcccaagaaagaagttaaaaagaagaggtggaaccgtcccaaaatgtcccttgctcagaagaaggatcgggtagctcaaaagaaggcaagcttcctcagagctcaggagcgggctgctgagagctaaacccagcaattttctatgattttttcagatatagataataaacttatgaacagcacctannanaaannnnannnnnnnnnnnnnnnnnnnnnnnnnnnnnnnnnnnnnnnnnnnnnnnnnnnnn

SEQ ID NO: 148 - DNA, 1342 bp, Homo Sapiens
  misc_feature (709)..(709): n is a, c, g, or t
  misc_feature (714)..(714): n is a, c, g, or t
  misc_feature (717)..(717): n is a, c, g, or t
  misc_feature (783)..(783): n is a, c, g, or t
  misc_feature (795)..(795): n is a, c, g, or t
  misc_feature (812)..(812): n is a, c, g, or t
  misc_feature (877)..(877): n is a, c, g, or t
  misc_feature (881)..(881): n is a, c, g, or t
  misc_feature (887)..(887): n is a, c, g, or t
  misc_feature (941)..(941): n is a, c, g, or t
  misc_feature (946)..(946): n is a, c, g, or t
  misc_feature (953)..(953): n is a, c, g, or t
  misc_feature (957)..(957): n is a, c, g, or t
  misc_feature (979)..(979): n is a, c, g, or t
  misc_feature (990)..(990): n is a, c, g, or t
  misc_feature (993)..(993): n is a, c, g, or t
  misc_feature (1000)..(1000): n is a, c, g, or t
  misc_feature (1002)..(1002): n is a, c, g, or t
  misc_feature (1006)..(1006): n is a, c, g, or t
  misc_feature (1012)..(1012): n is a, c, g, or t
  misc_feature (1014)..(1014): n is a, c, g, or t
  misc_feature (1022)..(1022): n is a, c, g, or t
  misc_feature (1035)..(1037): n is a, c, g, or t
  misc_feature (1041)..(1041): n is a, c, g, or t
  misc_feature (1043)..(1044): n is a, c, g, or t
  misc_feature (1050)..(1050): n is a, c, g, or t
  misc_feature (1053)..(1054): n is a, c, g, or t
  misc_feature (1063)..(1063): n is a, c, g, or t
  misc_feature (1068)..(1068): n is a, c, g, or t
  misc_feature (1075)..(1076): n is a, c, g, or t
  misc_feature (1084)..(1125): n is a, c, g, or t
  misc_feature (1131)..(1131): n is a, c, g, or t
  misc_feature (1139)..(1139): n is a, c, g, or t
  misc_feature (1144)..(1147): n is a, c, g, or t
  misc_feature (1149)..(1149): n is a, c, g, or t
  misc_feature (1155)..(1156): n is a, c, g, or t
  misc_feature (1161)..(1161): n is a, c, g, or t
  misc_feature (1164)..(1167): n is a, c, g, or t
  misc_feature (1170)..(1170): n is a, c, g, or t
  misc_feature (1176)..(1176): n is a, c, g, or t
  misc_feature (1180)..(1183): n is a, c, g, or t
  misc_feature (1191)..(1192): n is a, c, g, or t
  misc_feature (1195)..(1196): n is a, c, g, or t
  misc_feature (1201)..(1201): n is a, c, g, or t
  misc_feature (1209)..(1210): n is a, c, g, or t
  misc_feature (1214)..(1214): n is a, c, g, or t
  misc_feature (1224)..(1228): n is a, c, g, or t
  misc_feature (1230)..(1231): n is a, c, g, or t
  misc_feature (1236)..(1236): n is a, c, g, or t
  misc_feature (1240)..(1240): n is a, c, g, or t
  misc_feature (1249)..(1249): n is a, c, g, or t
  misc_feature (1252)..(1252): n is a, c, g, or t
  misc_feature (1256)..(1258): n is a, c, g, or t
  misc_feature (1260)..(1264): n is a, c, g, or t
  misc_feature (1268)..(1268): n is a, c, g, or t
  misc_feature (1271)..(1271): n is a, c, g, or t
  misc_feature (1276)..(1288): n is a, c, g, or t
  misc_feature (1290)..(1290): n is a, c, g, or t
  misc_feature (1292)..(1292): n is a, c, g, or t
  misc_feature (1299)..(1301): n is a, c, g, or t
  misc_feature (1304)..(1305): n is a, c, g, or t
  misc_feature (1307)..(1308): n is a, c, g, or t
  misc_feature (1310)..(1315): n is a, c, g, or t
  misc_feature (1320)..(1321): n is a, c, g, or t
  misc_feature (1324)..(1327): n is a, c, g, or t
  misc_feature (1332)..(1332): n is a, c, g, or t
  misc_feature (1336)..(1339): n is a, c, g, or t
  misc_feature (1342)..(1342): n is a, c, g, or t
agaaattactatgagaggatcgcatcaccatcaccatcacggatcctatttaggtgacactatagaatcgtcgacccacgcgtccggccaccccctggcgagcggagccacacccagcgccttgcagtctaaggagagcccatgcctttggacatgctgttccttctgcctggaatttccttgtccgcctggtgaactcctcgttctgcaagactccgctcaaaacagcaccttcgagaagactgccctgccccttccctgccttgccccatgtccccctcccttgggtccccagagccacgcacatccagccctgcttcccacacacggggccgtgcgtgcctttcttcaccactgagctccttcaagggcagggactgtctttatctttgcatcccccgctgcaccctgtgcctgcccactgggcactcggtggatggtgtgcgggcggatgggtgagtgagcggacaaaggtgggtctgaggctggccctgtgtggtgtgaggtttggtggtcaggacctgggcgggtggtcctgagtgctggcccgtgtgcttgaaagggtgtggtgctattgggtcctactgtgttccccaggtcccgcagcccccggaagccaatagactccctcagggactctcggtccctcagctactcgcctgtggagcgtcgccgtccctcgccccagccctcaccacgggaccagcanagcancancagtgagcggggttcccggagaggccagcgtggggacagccgctcccccagccacaagcgcagganggagaaacctanccctcggcccatgaaanaccgctcctccaggtctccataaattgtctttggggggattccaccaacacccaatgctctgganccanaaggantgtcccttcttccccaacaaaaccgtgggaagggtccttgtctgctctcctttnaaacnttggcancccnttggaaggaagggctccctttnccctccccccnaantttttangntttnttaaangnattttggnttttttaaaaatnnngtanannaaaaanaanntttttttgntcaanaaaaatnnaaaatgcnnnnnnnnnnnnnnnnnnnnnnnnnnnnnnnnnnnnnnnnnngggggncccccccnaaagnnnncnaaaaannttaantannnnaanttggancccnnnnaaaaaccnnaannacccnaaaccccnnggantttttaaaannnnntnngcccngggnttttttttnggnaaannnannnnntggnaanttttnnnnnnnnnnnnnangnaaaaaannnggnnanncnnnnnnaaccnnggnnnnaaaantttnnnnttn

SEQ ID NO: 149 - DNA, 256 bp, Homo Sapiens
  misc_feature (4)..(4): n is a, c, g, or t
  misc_feature (12)..(12): n is a, c, g, or t
  misc_feature (18)..(18): n is a, c, g, or t
  misc_feature (253)..(253): n is a, c, g, or t
ttcnttaaagangagaanttactatgagaggatcgcatcaccatcaccatcacggatcctatttaggtgacactataaaatcgtcgacccacgcgtccgggcgggtccgcggcgcggtcggtcggcgcctgttctcgggctgtttggcggacgaagcttcacaaaagatgtctaagcaacagccaactcagtttataaatccagaaacacctggctatgttggatttgcaaacctccccaatcaagttcaccnttt

SEQ ID NO: 150 - DNA, 256 bp, Homo Sapiens
  misc_feature (19)..(19): n is a, c, g, or t
ttattaaagaggagaaatnacttgagaggatcgcatcaccatcaccatcacggatcctatttaggtgacactatagaatcgtcgacccacgcgtccgcccacgcgtccgcccacgcgtccgccaagacagacctggtccctgccttccagaacctgatgaaagactgtgaggccgaggtgagggccgcagcctcccacaaggtcaaagagttctgtgaaaacctctcagctgactgtcgggagaatgtgatcatgt

SEQ ID NO: 151 - DNA, 1496 bp, Homo Sapiens
  misc_feature (1)..(10): n is a, c, g, or t
  misc_feature (12)..(12): n is a, c, g, or t
  misc_feature (15)..(15): n is a, c, g, or t
  misc_feature (25)..(25): n is a, c, g, or t
  misc_feature (29)..(29): n is a, c, g, or t
  misc_feature (74)..(74): n is a, c, g, or t
  misc_feature (82)..(82): n is a, c, g, or t
  misc_feature (93)..(93): n is a, c, g, or t
  misc_feature (107)..(107): n is a, c, g, or t
  misc_feature (128)..(128): n is a, c, g, or t
  misc_feature (141)..(141): n is a, c, g, or t
  misc_feature (855)..(855): n is a, c, g, or t
  misc_feature (864)..(864): n is a, c, g, or t
  misc_feature (877)..(877): n is a, c, g, or t
  misc_feature (887)..(887): n is a, c, g, or t
  misc_feature (896)..(896): n is a, c, g, or t
  misc_feature (924)..(924): n is a, c, g, or t
  misc_feature (944)..(944): n is a, c, g, or t
  misc_feature (950)..(950): n is a, c, g, or t
  misc_feature (962)..(962): n is a, c, g, or t
  misc_feature (974)..(974): n is a, c, g, or t
  misc_feature (977)..(977): n is a, c, g, or t
  misc_feature (1040)..(1040): n is a, c, g, or t
  misc_feature (1056)..(1056): n is a, c, g, or t
  misc_feature (1068)..(1068): n is a, c, g, or t
  misc_feature (1070)..(1070): n is a, c, g, or t
  misc_feature (1083)..(1083): n is a, c, g, or t
  misc_feature (1090)..(1090): n is a, c, g, or t
  misc_feature (1099)..(1099): n is a, c, g, or t
  misc_feature (1106)..(1106): n is a, c, g, or t
  misc_feature (1112)..(1112): n is a, c, g, or t
  misc_feature (1117)..(1117): n is a, c, g, or t
  misc_feature (1120)..(1120): n is a, c, g, or t
  misc_feature (1130)..(1130): n is a, c, g, or t
  misc_feature (1141)..(1141): n is a, c, g, or t
  misc_feature (1147)..(1147): n is a, c, g, or t
  misc_feature (1154)..(1154): n is a, c, g, or t
  misc_feature (1156)..(1156): n is a, c, g, or t
  misc_feature (1179)..(1179): n is a, c, g, or t
  misc_feature (1184)..(1184): n is a, c, g, or t
  misc_feature (1190)..(1190): n is a, c, g, or t
  misc_feature (1193)..(1193): n is a, c, g, or t
  misc_feature (1198)..(1198): n is a, c, g, or t
  misc_feature (1205)..(1205): n is a, c, g, or t
  misc_feature (1225)..(1225): n is a, c, g, or t
  misc_feature (1235)..(1235): n is a, c, g, or t
  misc_feature (1241)..(1241): n is a, c, g, or t
  misc_feature (1247)..(1247): n is a, c, g, or t
  misc_feature (1249)..(1249): n is a, c, g, or t
  misc_feature (1259)..(1260): n is a, c, g, or t
  misc_feature (1264)..(1264): n is a, c, g, or t
  misc_feature (1272)..(1273): n is a, c, g, or t
  misc_feature (1306)..(1306): n is a, c, g, or t
  misc_feature (1310)..(1311): n is a, c, g, or t
  misc_feature (1328)..(1330): n is a, c, g, or t
  misc_feature (1338)..(1338): n is a, c, g, or t
  misc_feature (1346)..(1346): n is a, c, g, or t
  misc_feature (1352)..(1352): n is a, c, g, or t
  misc_feature (1354)..(1354): n is a, c, g, or t
  misc_feature (1363)..(1363): n is a, c, g, or t
  misc_feature (1371)..(1371): n is a, c, g, or t
  misc_feature (1373)..(1373): n is a, c, g, or t
  misc_feature (1378)..(1378): n is a, c, g, or t
  misc_feature (1398)..(1398): n is a, c, g, or t
  misc_feature (1402)..(1408): n is a, c, g, or t
  misc_feature (1410)..(1410): n is a, c, g, or t
  misc_feature (1414)..(1414): n is a, c, g, or t
  misc_feature (1422)..(1423): n is a, c, g, or t
  misc_feature (1425)..(1425): n is a, c, g, or t
  misc_feature (1427)..(1429): n is a, c, g, or t
  misc_feature (1431)..(1431): n is a, c, g, or t
  misc_feature (1433)..(1434): n is a, c, g, or t
  misc_feature (1436)..(1436): n is a, c, g, or t
  misc_feature (1438)..(1438): n is a, c, g, or t
  misc_feature (1440)..(1441): n is a, c, g, or t
  misc_feature (1443)..(1445): n is a, c, g, or t
  misc_feature (1452)..(1452): n is a, c, g, or t
  misc_feature (1458)..(1459): n is a, c, g, or t
  misc_feature (1463)..(1463): n is a, c, g, or t
  misc_feature (1467)..(1470): n is a, c, g, or t
  misc_feature (1472)..(1473): n is a, c, g, or t
  misc_feature (1476)..(1478): n is a, c, g, or t
  misc_feature (1480)..(1481): n is a, c, g, or t
  misc_feature (1495)..(1495): n is a, c, g, or t
nnnnnnnnnngnatngagaaaattnctangagagggatgcatcaccatcaccattcacgggatcctatttaggntggacacntatagaatcgntcgacccacgccgntccgcccacgcgcccacgcgntccgcccacgcgntccgggcgagcagaactacggcgagcgggaatcccgttctgcttccagaagtggaagtgctcacggatcggggaaatctgcaaggcatacccctgcaaggtctcgctccaaggaagattccaggcgttccagatcaaagtccaggtcccgatctgaatctaggtctagatccagaagaagctcccgaaggcattatacccggtcacggtctcgctcccgctcccatagacgatcacgtagcaggtcttacagtcgagattatcgtagacggcacagccacagccattctcccatgtctactcgcaggcgtcatgttgggaatcgggcaaatcctgatcctaactgttgtcttggagtatttgggctgagcttgtacaccacagaaagagatctaagagaagtgttctctaaatatggtcccattgccgatgtgtctattgtatatgaccagcagtctaggcgttcaagaggatttgcctttgtatattttgaaaatgtagatgatgccaaggaagctaaagaacgtgccaatggaatggagcttgatgggcgtaggatcagagttgatttctctataacaaaaagaccacatacgccaacaccaggaatttacatggggagacctacctatggcagctctcgccgtcgggattactatgacagaggatatgatcggggctatgatgatcgggactactatagcagatcatacanaaggaggangtggaggaaggangaggatgganagctgcccnaaaacagggatcaaaatttatagaaggnggtcaccttctccttactanagtcgngggaggatacanatcacgttccanatntcgatcatacttcacctcgtcccttataaaagcatgaaaaacttttctgaaaacctgccctanaagcttggaaatttgntttgggggcaanantttttttattgtncccttgnttaaaaagngaaacantggccnaaggnaantttaggggantttttacaccnttttanaaaagantnacttttggggggaagttgaaaanggcgnttttcnttncggcnttttggngaaatttggggctttgttcnaaataaaggntttttnaaaaanantgttttggcnngganttttttanncccaaaattttaaggggggaaaatttttttttnaaannttttttaaaaggttttnnntaaacccnggtttttnaaaaananccggtaaantctccagngnaaaanccaaaaaattttttttttanaaannnnnnnanatanaaataaanntnannnanannanananntnnnaaaaggngccccnnaagnaaannnnannggnnntnnaaaaaaaccaaatnt

SEQ ID NO: 152 - DNA, 1200 bp, Homo Sapiens
  misc_feature (14)..(14): n is a, c, g, or t
  misc_feature (953)..(953): n is a, c, g, or t
  misc_feature (963)..(963): n is a, c, g, or t
  misc_feature (985)..(985): n is a, c, g, or t
  misc_feature (987)..(987): n is a, c, g, or t
  misc_feature (1015)..(1015): n is a, c, g, or t
  misc_feature (1021)..(1021): n is a, c, g, or t
  misc_feature (1023)..(1023): n is a, c, g, or t
  misc_feature (1026)..(1026): n is a, c, g, or t
  misc_feature (1037)..(1037): n is a, c, g, or t
  misc_feature (1045)..(1045): n is a, c, g, or t
  misc_feature (1050)..(1050): n is a, c, g, or t
  misc_feature (1060)..(1060): n is a, c, g, or t
  misc_feature (1069)..(1069): n is a, c, g, or t
  misc_feature (1074)..(1074): n is a, c, g, or t
  misc_feature (1081)..(1081): n is a, c, g, or t
  misc_feature (1088)..(1088): n is a, c, g, or t
  misc_feature (1102)..(1102): n is a, c, g, or t
  misc_feature (1106)..(1106): n is a, c, g, or t
  misc_feature (1114)..(1114): n is a, c, g, or t
  misc_feature (1116)..(1116): n is a, c, g, or t
  misc_feature (1122)..(1122): n is a, c, g, or t
  misc_feature (1126)..(1126): n is a, c, g, or t
  misc_feature (1133)..(1133): n is a, c, g, or t
  misc_feature (1135)..(1135): n is a, c, g, or t
  misc_feature (1137)..(1138): n is a, c, g, or t
  misc_feature (1142)..(1142): n is a, c, g, or t
  misc_feature (1146)..(1146): n is a, c, g, or t
  misc_feature (1158)..(1158): n is a, c, g, or t
  misc_feature (1161)..(1161): n is a, c, g, or t
  misc_feature (1163)..(1163): n is a, c, g, or t
  misc_feature (1168)..(1168): n is a, c, g, or t
  misc_feature (1170)..(1171): n is a, c, g, or t
  misc_feature (1174)..(1174): n is a, c, g, or t
aatagagaaattanctatgagaggatcgcatcaccatcaccatcacggatcctatttaggtgacactatagaatcgtcgacccacgcgtccgatgctctgcactcagctctggggggcacaaagaagaaaaagaagactattgtgactgatgttttccaggggtccatgaggatcttcactaaaaagcttccccatcctgatctgccagcagaagaaaaagagcagttgctccataatgacgagtaccaggagacaatggtggagtccacttttatgtacctgacgctggaccttcctactgcccccctctacaaggacgagaaggagcagctcatcattccccaagtgccactcttcaacatcctggctaagttcaatggcatcactgagaaggaatataagacttacaaggagaactttctgaagcgcttccagcttaccaagttgcctccatatctaatcttttgtatcaagagattcactaagaacaacttctttgttgagaagaatccaactattgtcaatttccctattacaaatgtggatctgagagaatacttgtctgaagaagtacaagcagtacacaagaataccacctatgacctcattgccaacatcgtgcatgacggcaagccctccgagggctcctaccggatccacgtgcttcatcatgggacaggcaaatggtatgaattacaagacctccaggtgactgacatccttccccagatgatcacactgtcagaggcttacattcagatttggaagaggcgagataatgatgaaaccaaccagcagggggcttgaaggaggcgtctagggctttgctcccaagggctgtggctgatgatggtaaataagaacacagaagctgtagctgaacacaggctggctggtgggcttcctaggccagcccagcttggtatgggttctggctacaccagagcaccangagcccactngcctgggatggccccccactgncnctcagctgttctttgatcatttttttcnaaatgnangcnccttcccccangcattganctccntctagcttcngcagggcanaaccntccccanagggggnacttatgtcttganatcngggaatantngaaaanaaanattcctncnanntcancctngggattttggancancnaaaancnntancttcccctgtaaaggggggaatttcc

SEQ ID NO: 153 - DNA, 256 bp, Homo Sapiens
  misc_feature (2)..(2): n is a, c, g, or t
tnagaggagaattaactatgagaggatcgcatcaccatcaccatcacggatcctatttaggtgacactatagaatcgtcgacccacgcgtccgggcacggcctcgtgcccttcgccttcgtgcgcttcgaggacccccgagatgcagaggatgctatttatggaagaaatggttatgattatggccagtgtcggcttcgtgtggagttccccaggacttatggaggtcggggtgggtggccccgtggtgggaggaa

SEQ ID NO: 154 - DNA, 256 bp, Homo Sapiens
atagagaaaattactatgagaggatcgcatcaccatcaccatcacggatcctatttaggtgacactatagaatcgtcgacccacgcgtccgaggagagagccgccctcgagcggagcaaggcgattgagaaaaacctcaaagaggatggcatcagcgccgccaaagacgtgaaattactcctgctcggggctggagaatcaggaaaaagcaccattgtgaagcagatgaagatcatccatgaagatggcttctccg

SEQ ID NO: 155 - DNA, 1200 bp, Homo Sapiens
  misc_feature (774)..(774): n is a, c, g, or t
  misc_feature (800)..(800): n is a, c, g, or t
  misc_feature (830)..(830): n is a, c, g, or t
  misc_feature (848)..(848): n is a, c, g, or t
  misc_feature (855)..(855): n is a, c, g, or t
  misc_feature (857)..(857): n is a, c, g, or t
  misc_feature (915)..(915): n is a, c, g, or t
  misc_feature (925)..(926): n is a, c, g, or t
  misc_feature (934)..(934): n is a, c, g, or t
  misc_feature (943)..(943): n is a, c, g, or t
  misc_feature (946)..(946): n is a, c, g, or t
  misc_feature (949)..(949): n is a, c, g, or t
  misc_feature (952)..(952): n is a, c, g, or t
  misc_feature (961)..(961): n is a, c, g, or t
  misc_feature (983)..(983): n is a, c, g, or t
  misc_feature (993)..(993): n is a, c, g, or t
  misc_feature (996)..(996): n is a, c, g, or t
  misc_feature (1007)..(1007): n is a, c, g, or t
  misc_feature (1011)..(1011): n is a, c, g, or t
  misc_feature (1015)..(1015): n is a, c, g, or t
  misc_feature (1019)..(1019): n is a, c, g, or t
  misc_feature (1023)..(1023): n is a, c, g, or t
  misc_feature (1025)..(1025): n is a, c, g, or t
  misc_feature (1029)..(1029): n is a, c, g, or t
  misc_feature (1036)..(1036): n is a, c, g, or t
  misc_feature (1038)..(1038): n is a, c, g, or t
  misc_feature (1045)..(1045): n is a, c, g, or t
  misc_feature (1058)..(1058): n is a, c, g, or t
  misc_feature (1063)..(1063): n is a, c, g, or t
  misc_feature (1068)..(1068): n is a, c, g, or t
  misc_feature (1073)..(1073): n is a, c, g, or t
  misc_feature (1078)..(1078): n is a, c, g, or t
  misc_feature (1091)..(1091): n is a, c, g, or t
  misc_feature (1102)..(1104): n is a, c, g, or t
  misc_feature (1109)..(1111): n is a, c, g, or t
  misc_feature (1114)..(1114): n is a, c, g, or t
  misc_feature (1116)..(1116): n is a, c, g, or t
  misc_feature (1124)..(1124): n is a, c, g, or t
  misc_feature (1130)..(1130): n is a, c, g, or t
  misc_feature (1136)..(1137): n is a, c, g, or t
  misc_feature (1163)..(1163): n is a, c, g, or t
  misc_feature (1167)..(1167): n is a, c, g, or t
  misc_feature (1174)..(1174): n is a, c, g, or t
  misc_feature (1184)..(1184): n is a, c, g, or t
  misc_feature (1187)..(1187): n is a, c, g, or t
  misc_feature (1191)..(1191): n is a, c, g, or t
  misc_feature (1196)..(1196): n is a, c, g, or t
attagagaaattactatgagaggatcgcatcaccatcaccatcacggatcctatttaggtgacactatagaatcgtcgacccacgcgtccggtcgccgatcccgccggaagcgccaggacaatggggacccgggacgacgagtacgactacctattcaaagtggtgctcatcggggactcaggcgtgggcaagagcaacctgctgtcgcgcttcacccgcaacgagttcaacctggagagcaagagcaccatcggcgtggagttcgccacccgcagcatccaggtggacggcaagaccatcaaggcgcagatctgggacaccgctggccaggagcgctaccgcgccatcacctccgcgtactaccgtggtgcagtgggcgccctgctggtgtacgacatcgccaagcacctgacctatgagaacgtggagcgctggctgaaggagctgcgggaccacgcagacagcaacatcgtcatcatgctggtgggcaacaagagtgacctgcgccacctgcgggctgtgcccactgacgaggcccgcgccttcgcagaaaagaacaacttgtccttcatcgagacctcagccttggattccactaacgtagaggaagcattcaagaacatcctcacaggtggccggggaccagatgggtgtgggtagggcaccagccaggcagggtggaacacggcctctgaaccttcgcttgttttgttcgtttgcttgtttttttcttttttttgtcggggcaggatggagttttgctctttgcccangctggagtgtggtggctcgatctcancttactgcaacctccgccttccaggttcangcaattctcctgcctcancctcccnantaactgggattacaggtgcctgccaccacacccgctaatttttgtaattttaataaanacaggatttnncaatgttntccaggttnatntcnaantccttgggntcaagtgatcctcttgcctcancctcccaaantgntgggaattaangggnggancccntgcncntggnctgtttnanttttttnccccccccccccntaacntttgnttttnaaacntgccgggtccccntggaaactttnnnagggnnnaananagttttancccttnttgggnntggggaaaaaaaaaaacccccttggncccnatttttnggggaagggnccnggcnttaantttt

SEQ ID NO: 156 - DNA, 1208 bp, Homo Sapiens
  misc_feature (198)..(198): n is a, c, g, or t
  misc_feature (374)..(374): n is a, c, g, or t
  misc_feature (426)..(426): n is a, c, g, or t
  misc_feature (789)..(789): n is a, c, g, or t
  misc_feature (794)..(794): n is a, c, g, or t
  misc_feature (806)..(806): n is a, c, g, or t
  misc_feature (816)..(816): n is a, c, g, or t
  misc_feature (821)..(822): n is a, c, g, or t
  misc_feature (896)..(896): n is a, c, g, or t
  misc_feature (950)..(950): n is a, c, g, or t
  misc_feature (993)..(993): n is a, c, g, or t
  misc_feature (1011)..(1011): n is a, c, g, or t
  misc_feature (1029)..(1029): n is a, c, g, or t
  misc_feature (1056)..(1056): n is a, c, g, or t
  misc_feature (1066)..(1066): n is a, c, g, or t
  misc_feature (1072)..(1073): n is a, c, g, or t
  misc_feature (1082)..(1082): n is a, c, g, or t
  misc_feature (1100)..(1100): n is a, c, g, or t
  misc_feature (1105)..(1105): n is a, c, g, or t
  misc_feature (1116)..(1116): n is a, c, g, or t
  misc_feature (1126)..(1126): n is a, c, g, or t
  misc_feature (1136)..(1136): n is a, c, g, or t
  misc_feature (1140)..(1140): n is a, c, g, or t
  misc_feature (1145)..(1147): n is a, c, g, or t
  misc_feature (1161)..(1161): n is a, c, g, or t
  misc_feature (1180)..(1181): n is a, c, g, or t
  misc_feature (1188)..(1188): n is a, c, g, or t
  misc_feature (1190)..(1190): n is a, c, g, or t
  misc_feature (1202)..(1202): n is a, c, g, or t
  misc_feature (1205)..(1205): n is a, c, g, or t
tagagaaattactatgagaggatcgcatcaccatcaccatcacggatcctatttaggtgacactatagaatcgtcgacccacgcgtccggcgataaagaaggaacttcaaattccacctctgaagatgggccaggggatggattcaccattctgtcttctaagagccttgttctgggacagaagctgtccttaacccngagtgacatcagccatattggctccatgagagtggagggcattgtccacccaaccacagccgaaattgacctcaaagaagatataggtaaagccttggaaaaggctgggggaaaagagttcttggaaacggtaaaggagcttcgcaaatcccaaggccctttggaagtcgccgaanccgccgtcagccaatccagtggactcgcagccaaatttgtcatccactgtcncatccctcagtggggctccgacaaatgtgaagaacagcttgaagagaccatcaaaaactgcctgtcagcggcggaggacaagaagctaaagtccgtcgcgttcccgcctttccccagcggcagaaactgctttcccaaacagactgcggcccaggtgaccctcaaagccatctcagcccactttgatgactcgagcgcgtcctcgctgaagaacgtgtacttcctgctcttcgacagcgagagcatcggcatctacgtgcaggagatggccaagctcgacgccaagtagccgccgcactttccagcagggatcggaggacgacccgagtcccaagagtggggttttgctttttaaaaggaganaggangggtgatggcangggagtgganggtgnncgggcaggtcctgccggcgcagggagccctctgcccttcacactctcctccaaaagagcctccatctgtaaggnaagcaggtctccgcgagggggtttctttccatgtgtttcccccctggtggtttnagaactttttttaaaaaaacagacctcgtttaaatttatagcnttgacttttacccccttncccccaggaaaaaattcntttcaaaattctaaatcttctgtcccnctttttccanggaaannggcaaaaanggcctgggctttgtgggntgccntttcggggcgnaaaaaaaaantgggaaaaanttcncgggnnnttttcctttttttnaggccccccccccctcctnnaatttgnanctctctaaaagnttnaat

SEQ ID NO: 157 - DNA, 1261 bp, Homo Sapiens
  misc_feature (85)..(85): n is a, c, g, or t
  misc_feature (90)..(90): n is a, c, g, or t
  misc_feature (93)..(93): n is a, c, g, or t
  misc_feature (101)..(101): n is a, c, g, or t
  misc_feature (105)..(106): n is a, c, g, or t
  misc_feature (115)..(115): n is a, c, g, or t
  misc_feature (138)..(138): n is a, c, g, or t
  misc_feature (149)..(149): n is a, c, g, or t
  misc_feature (153)..(154): n is a, c, g, or t
  misc_feature (157)..(158): n is a, c, g, or t
  misc_feature (160)..(160): n is a, c, g, or t
  misc_feature (170)..(170): n is a, c, g, or t
  misc_feature (189)..(189): n is a, c, g, or t
  misc_feature (194)..(194): n is a, c, g, or t
  misc_feature (217)..(217): n is a, c, g, or t
  misc_feature (220)..(220): n is a, c, g, or t
  misc_feature (236)..(236): n is a, c, g, or t
  misc_feature (242)..(243): n is a, c, g, or t
  misc_feature (248)..(249): n is a, c, g, or t
  misc_feature (264)..(264): n is a, c, g, or t
  misc_feature (278)..(278): n is a, c, g, or t
  misc_feature (282)..(282): n is a, c, g, or t
  misc_feature (285)..(285): n is a, c, g, or t
  misc_feature (291)..(292): n is a, c, g, or t
  misc_feature (294)..(295): n is a, c, g, or t
  misc_feature (302)..(304): n is a, c, g, or t
  misc_feature (310)..(310): n is a, c, g, or t
  misc_feature (337)..(337): n is a, c, g, or t
  misc_feature (345)..(345): n is a, c, g, or t
  misc_feature (347)..(348): n is a, c, g, or t
  misc_feature (351)..(351): n is a, c, g, or t
  misc_feature (353)..(354): n is a, c, g, or t
  misc_feature (357)..(357): n is a, c, g, or t
  misc_feature (360)..(360): n is a, c, g, or t
  misc_feature (362)..(363): n is a, c, g, or t
  misc_feature (372)..(372): n is a, c, g, or t
  misc_feature (380)..(383): n is a, c, g, or t
  misc_feature (390)..(390): n is a, c, g, or t
  misc_feature (392)..(393): n is a, c, g, or t
  misc_feature (401)..(401): n is a, c, g, or t
  misc_feature (405)..(405): n is a, c, g, or t
  misc_feature (408)..(408): n is a, c, g, or t
  misc_feature (410)..(410): n is a, c, g, or t
  misc_feature (415)..(415): n is a, c, g, or t
  misc_feature (418)..(418): n is a, c, g, or t
  misc_feature (421)..(421): n is a, c, g, or t
  misc_feature (423)..(423): n is a, c, g, or t
  misc_feature (429)..(429): n is a, c, g, or t
  misc_feature (433)..(434): n is a, c, g, or t
  misc_feature (436)..(436): n is a, c, g, or t
  misc_feature (438)..(438): n is a, c, g, or t
  misc_feature (443)..(444): n is a, c, g, or t
  misc_feature (447)..(447): n is a, c, g, or t
  misc_feature (451)..(454): n is a, c, g, or t
  misc_feature (459)..(459): n is a, c, g, or t
  misc_feature (470)..(470): n is a, c, g, or t
  misc_feature (481)..(481): n is a, c, g, or t
  misc_feature (485)..(485): n is a, c, g, or t
  misc_feature (491)..(491): n is a, c, g, or t
  misc_feature (496)..(496): n is a, c, g, or t
  misc_feature (533)..(533): n is a, c, g, or t
  misc_feature (556)..(556): n is a, c, g, or t
  misc_feature (564)..(564): n is a, c, g, or t
  misc_feature (567)..(568): n is a, c, g, or t
  misc_feature (570)..(572): n is a, c, g, or t
  misc_feature (574)..(574): n is a, c, g, or t
  misc_feature (586)..(586): n is a, c, g, or t
  misc_feature (589)..(589): n is a, c, g, or t
  misc_feature (594)..(594): n is a, c, g, or t
  misc_feature (597)..(597): n is a, c, g, or t
  misc_feature (603)..(604): n is a, c, g, or t
  misc_feature (609)..(609): n is a, c, g, or t
  misc_feature (613)..(614): n is a, c, g, or t
  misc_feature (618)..(618): n is a, c, g, or t
  misc_feature (621)..(621): n is a, c, g, or t
  misc_feature (630)..(630): n is a, c, g, or t
  misc_feature (632)..(632): n is a, c, g, or t
  misc_feature (645)..(646): n is a, c, g, or t
  misc_feature (649)..(650): n is a, c, g, or t
  misc_feature (671)..(671): n is a, c, g, or t
  misc_feature (697)..(697): n is a, c, g, or t
  misc_feature (703)..(703): n is a, c, g, or t
  misc_feature (705)..(705): n is a, c, g, or t
  misc_feature (709)..(710): n is a, c, g, or t
  misc_feature (739)..(739): n is a, c, g, or t
  misc_feature (742)..(742): n is a, c, g, or t
  misc_feature (751)..(751): n is a, c, g, or t
  misc_feature (760)..(761): n is a, c, g, or t
  misc_feature (764)..(764): n is a, c, g, or t
  misc_feature (766)..(767): n is a, c, g, or t
  misc_feature (770)..(770): n is a, c, g, or t
  misc_feature (776)..(776): n is a, c, g, or t
  misc_feature (804)..(804): n is a, c, g, or t
  misc_feature (814)..(814): n is a, c, g, or t
  misc_feature (823)..(823): n is a, c, g, or t
  misc_feature (827)..(827): n is a, c, g, or t
  misc_feature (843)..(843): n is a, c, g, or t
  misc_feature (858)..(858): n is a, c, g, or t
  misc_feature (860)..(860): n is a, c, g, or t
  misc_feature (862)..(863): n is a, c, g, or t
  misc_feature (873)..(873): n is a, c, g, or t
  misc_feature (886)..(886): n is a, c, g, or t
  misc_feature (890)..(891): n is a, c, g, or t
  misc_feature (894)..(894): n is a, c, g, or t
  misc_feature (898)..(898): n is a, c, g, or t
  misc_feature (926)..(926): n is a, c, g, or t
  misc_feature (937)..(937): n is a, c, g, or t
  misc_feature (942)..(942): n is a, c, g, or t
  misc_feature (954)..(954): n is a, c, g, or t
  misc_feature (964)..(965): n is a, c, g, or t
  misc_feature (971)..(971): n is a, c, g, or t
  misc_feature (1016)..(1016): n is a, c, g, or t
  misc_feature (1024)..(1024): n is a, c, g, or t
  misc_feature (1046)..(1046): n is a, c, g, or t
  misc_feature (1065)..(1065): n is a, c, g, or t
  misc_feature (1067)..(1067): n is a, c, g, or t
  misc_feature (1078)..(1078): n is a, c, g, or t
  misc_feature (1094)..(1094): n is a, c, g, or t
  misc_feature (1097)..(1097): n is a, c, g, or t
  misc_feature (1100)..(1100): n is a, c, g, or t
  misc_feature (1104)..(1104): n is a, c, g, or t
  misc_feature (1107)..(1107): n is a, c, g, or t
  misc_feature (1111)..(1111): n is a, c, g, or t
  misc_feature (1119)..(1119): n is a, c, g, or t
  misc_feature (1124)..(1124): n is a, c, g, or t
  misc_feature (1126)..(1126): n is a, c, g, or t
  misc_feature (1132)..(1132): n is a, c, g, or t
  misc_feature (1139)..(1139): n is a, c, g, or t
  misc_feature (1141)..(1141): n is a, c, g, or t
  misc_feature (1148)..(1148): n is a, c, g, or t
  misc_feature (1156)..(1156): n is a, c, g, or t
  misc_feature (1160)..(1160): n is a, c, g, or t
  misc_feature (1164)..(1165): n is a, c, g, or t
  misc_feature (1167)..(1167): n is a, c, g, or t
  misc_feature (1176)..(1176): n is a, c, g, or t
  misc_feature (1184)..(1185): n is a, c, g, or t
  misc_feature (1192)..(1192): n is a, c, g, or t
  misc_feature (1196)..(1196): n is a, c, g, or t
  misc_feature (1210)..(1210): n is a, c, g, or t
  misc_feature (1217)..(1217): n is a, c, g, or t
  misc_feature (1222)..(1222): n is a, c, g, or t
  misc_feature (1229)..(1229): n is a, c, g, or t
  misc_feature (1245)..(1245): n is a, c, g, or t
  misc_feature (1254)..(1254): n is a, c, g, or t
agagaaattactatgagaggatcgcatcaccatcaccatcacggatcctatttaggtgacactatagaatcgtcgacccacgcgntccgnccncgccgttncggnngatgcacanggacccgatcctgctggacaganacagccatacngttnnganntncagtgcagtncctccttcgtgcctagcancatgncttgtgaattatgtgcatgcacnacntattttatcttgattngctcanngagcnnatacttgaaagctangaaaagaccaaggnccgngcnttgatnntnngcaaccnnnagaacngaaatgctgacacggtcccctcctccnctcagcgncnngcnannganaangnnactgaggantatcattnnnngaagttnannatgatgantagncgncnctganttntgnanagaggnatgnngntntcgcnntcntctnnnnatatncctcccatganaaatggtttcntgcncgttcntgtgnggctcacgcctgattatcccagcactttggagaggtnaatgggggcgcatctgcctgacntgggtagnttnntnnnancctgaccttttngtngaaanccnttctcnngtganattnnatanaangtggcctgncntggtggctgatgnntgnnatcccaccatgctcatgaggngtgaggcagaatgattgcttgaaccntgtggntntcannttgtggtgagctcgagattgcacctttgnacnccttgctgngcaaacgannaangnngtntgtctntagctccccaccagatgaaagataggtnaaattgggtncagatatanattntgctcatttgctggcngactgttccagaaananannctggtaactncttctacattacngtgnnggncttnttcaagcactaaattttataactttttngaaaaaaaatnaatgngtaattttccantttgggggcnnacctcnattccttgtgagcatttttaaatcttgtttgtaaaaaaaattggncttccccntaaaaatttgccccggggccangaaaaaacctgttccgggntntgttaaaaaancctttaaatgggcctngcnttntttntanaggnacaagccnttctncntttcgngggattntntggggtntaaaaatncttnctcnncnaaaaaaaantccaaaannaaatttnaaanttcccgggggtttncgaaatnaaaanaaaactntttgtttttttaaaanacataaacnagttttg

SEQ ID NO: 158 - DNA, 1346 bp, Homo Sapiens
  misc_feature (9)..(9): n is a, c, g, or t
  misc_feature (756)..(756): n is a, c, g, or t
  misc_feature (771)..(771): n is a, c, g, or t
  misc_feature (786)..(786): n is a, c, g, or t
  misc_feature (818)..(818): n is a, c, g, or t
  misc_feature (868)..(868): n is a, c, g, or t
  misc_feature (903)..(903): n is a, c, g, or t
  misc_feature (908)..(908): n is a, c, g, or t
  misc_feature (916)..(916): n is a, c, g, or t
  misc_feature (924)..(924): n is a, c, g, or t
  misc_feature (927)..(927): n is a, c, g, or t
  misc_feature (929)..(929): n is a, c, g, or t
  misc_feature (932)..(932): n is a, c, g, or t
  misc_feature (936)..(936): n is a, c, g, or t
  misc_feature (969)..(969): n is a, c, g, or t
  misc_feature (979)..(979): n is a, c, g, or t
  misc_feature (984)..(985): n is a, c, g, or t
  misc_feature (994)..(996): n is a, c, g, or t
  misc_feature (998)..(998): n is a, c, g, or t
  misc_feature (1001)..(1001): n is a, c, g, or t
  misc_feature (1005)..(1005): n is a, c, g, or t
  misc_feature (1008)..(1008): n is a, c, g, or t
  misc_feature (1023)..(1025): n is a, c, g, or t
  misc_feature (1027)..(1027): n is a, c, g, or t
  misc_feature (1035)..(1035): n is a, c, g, or t
  misc_feature (1046)..(1048): n is a, c, g, or t
  misc_feature (1052)..(1052): n is a, c, g, or t
  misc_feature (1057)..(1057): n is a, c, g, or t
  misc_feature (1060)..(1060): n is a, c, g, or t
  misc_feature (1066)..(1067): n is a, c, g, or t
  misc_feature (1074)..(1074): n is a, c, g, or t
  misc_feature (1076)..(1076): n is a, c, g, or t
  misc_feature (1078)..(1080): n is a, c, g, or t
  misc_feature (1087)..(1087): n is a, c, g, or t
  misc_feature (1089)..(1090): n is a, c, g, or t
  misc_feature (1092)..(1092): n is a, c, g, or t
  misc_feature (1100)..(1100): n is a, c, g, or t
  misc_feature (1107)..(1107): n is a, c, g, or t
  misc_feature (1111)..(1111): n is a, c, g, or t
  misc_feature (1115)..(1117): n is a, c, g, or t
  misc_feature (1120)..(1120): n is a, c, g, or t
  misc_feature (1122)..(1122): n is a, c, g, or t
  misc_feature (1133)..(1133): n is a, c, g, or t
  misc_feature (1135)..(1135): n is a, c, g, or t
  misc_feature (1137)..(1139): n is a, c, g, or t
  misc_feature (1144)..(1144): n is a, c, g, or t
  misc_feature (1152)..(1155): n is a, c, g, or t
  misc_feature (1163)..(1166): n is a, c, g, or t
  misc_feature (1175)..(1177): n is a, c, g, or t
  misc_feature (1183)..(1184): n is a, c, g, or t
  misc_feature (1188)..(1191): n is a, c, g, or t
  misc_feature (1193)..(1194): n is a, c, g, or t
  misc_feature (1197)..(1200): n is a, c, g, or t
  misc_feature (1204)..(1205): n is a, c, g, or t
  misc_feature (1209)..(1210): n is a, c, g, or t
  misc_feature (1212)..(1212): n is a, c, g, or t
  misc_feature (1215)..(1215): n is a, c, g, or t
  misc_feature (1217)..(1218): n is a, c, g, or t
  misc_feature (1226)..(1232): n is a, c, g, or t
  misc_feature (1235)..(1235): n is a, c, g, or t
  misc_feature (1239)..(1240): n is a, c, g, or t
  misc_feature (1250)..(1255): n is a, c, g, or t
  misc_feature (1264)..(1264): n is a, c, g, or t
  misc_feature (1266)..(1267): n is a, c, g, or t
  misc_feature (1271)..(1271): n is a, c, g, or t
  misc_feature (1275)..(1275): n is a, c, g, or t
  misc_feature (1279)..(1282): n is a, c, g, or t
  misc_feature (1288)..(1293): n is a, c, g, or t
  misc_feature (1297)..(1299): n is a, c, g, or t
  misc_feature (1305)..(1308): n is a, c, g, or t
  misc_feature (1315)..(1327): n is a, c, g, or t
  misc_feature (1331)..(1334): n is a, c, g, or t
  misc_feature (1336)..(1338): n is a, c, g, or t
  misc_feature (1341)..(1345): n is a, c, g, or t
tagagaaanttactatgagaggatcgcatcaccatcaccatcacggatcctatttaggtgacactatagaatcgtcgacccacgcgtccgggagaagcccaggccggccggaagaggagccgagcgcggccggaaggaaccgagcccgtccgaagggagcggagcgcagcctggcctggggcccggtcgagcccgcgccatggcggccgaggcgacagctgtggccggaagcggggctgttggcggctgcctggccaaagacggcttgcagcagtctaagtgcccggacactaccccaaaacggcggcgcgcctcgtcgctgtcgcgtgacgccgagcgccgagcctaccaatggtgccgggagtacttgggcggggcctggcgccgagtgcagcccgaggagctgagggtttaccccgtgaggtgggaggtcaggggtcagcctctccggtgcgcggatcggggtcaggggtcagccgcggggccctcaggatgctccatgttttcgcccccctcttgcgcccgcgcctggggcggggcggggccggcctggccgggagggggccggggccgcggcaggtagggccggccgcgggctgagcgcgcctggtgtgggtctgcagcggaggcctcagcaacctgctcttccgctgctcgctcccggaccacctgcccagcgttggcgaggagccccgggaggtgcttctgcggctgtacggagccatcttgcaggtgagggggttgtgagcgccgcancaccagtggctttanggcctgtcgcttacncgatgcgggtaatattgttcccgttgcgcaanttgaggacaccgaggttcacggtctgaataacacctcattacaccgaaancttgggcctgtattcccaaaacttttggaaagctnaagcnaaaagatnactttaancananganttcnaaaccaaccttgaaaaaaataattgaaaccccnttttttaaanaaaannaaaccaacnnntnaancttntgnttcaaaaacctccannnantttgattnaaaattcccannntttngtggnaanaaaggnnaaccccncntnnnttttccntnngncccttttncctttgncccntttnnnttncnttctttttttnangnnntgaanttccttgnnnntaaaaaannnnatttttccnnnattttnnaaannnntnnttnnnncccnntttnnanaantnnttcaaaannnnnnntgnaaannaattttcaannnnnnattttaaantnnaaantttnaaannnntttttnnnnnntttnnnaaaaannnnatttttnnnnnnnnnnnnntttnnnnannnccnnnnnt

SEQ ID NO: 159 - DNA, 1197 bp, Homo Sapiens
  misc_feature (1)..(1): n is a, c, g, or t
  misc_feature (907)..(907): n is a, c, g, or t
  misc_feature (909)..(909): n is a, c, g, or t
  misc_feature (954)..(954): n is a, c, g, or t
  misc_feature (958)..(958): n is a, c, g, or t
  misc_feature (969)..(969): n is a, c, g, or t
  misc_feature (972)..(972): n is a, c, g, or t
  misc_feature (1015)..(1015): n is a, c, g, or t
  misc_feature (1019)..(1019): n is a, c, g, or t
  misc_feature (1046)..(1046): n is a, c, g, or t
  misc_feature (1052)..(1052): n is a, c, g, or t
  misc_feature (1055)..(1055): n is a, c, g, or t
  misc_feature (1070)..(1070): n is a, c, g, or t
  misc_feature (1079)..(1079): n is a, c, g, or t
  misc_feature (1081)..(1081): n is a, c, g, or t
  misc_feature (1085)..(1086): n is a, c, g, or t
  misc_feature (1092)..(1092): n is a, c, g, or t
  misc_feature (1094)..(1094): n is a, c, g, or t
  misc_feature (1107)..(1107): n is a, c, g, or t
  misc_feature (1112)..(1112): n is a, c, g, or t
  misc_feature (1115)..(1115): n is a, c, g, or t
  misc_feature (1121)..(1121): n is a, c, g, or t
  misc_feature (1126)..(1126): n is a, c, g, or t
  misc_feature (1134)..(1134): n is a, c, g, or t
  misc_feature (1136)..(1136): n is a, c, g, or t
  misc_feature (1139)..(1139): n is a, c, g, or t
  misc_feature (1145)..(1145): n is a, c, g, or t
  misc_feature (1148)..(1148): n is a, c, g, or t
  misc_feature (1154)..(1154): n is a, c, g, or t
  misc_feature (1158)..(1159): n is a, c, g, or t
  misc_feature (1161)..(1161): n is a, c, g, or t
  misc_feature (1165)..(1165): n is a, c, g, or t
  misc_feature (1171)..(1171): n is a, c, g, or t
  misc_feature (1174)..(1174): n is a, c, g, or t
  misc_feature (1183)..(1183): n is a, c, g, or t
  misc_feature (1185)..(1185): n is a, c, g, or t
  misc_feature (1197)..(1197): n is a, c, g, or t
naatagagaaattactatgagaggatcgcatcaccatcaccatcacggatcctatttaggtgacactatagaatcgtcgacccacgcgtccgctcaagctgaagaagatcttagtgagcaagaacaaaatcagcttaatgtcctcaaaaagcatggttatgtcgtaggaagagttggaaggacattcttgtattcagaagaacagaaggataacattccctttgagtttgatgctgattcacttgcctttgacatggaaaatgaccctgttatgggtacacacaaatccaccaaacaagtagaattgactgcacaagatgtgaaagatgcccactggttttatgacacccctggaattacaaaagaaaattgtattttaaatcttctaacagaaaaagaagtaaatattgttttgccaacacagtccattgttccaagaacttttgtgcttaaaccaggaatggttctgtttttgggtgctataggccgcatagatttcctgcagggaaatcagtcagcttggtttacagtcgtggcttccaacatcctccctgtgcatatcacctccttggacagggcagacgctctgtatcagaagcatgcaggtcatacgttactccagattccaatgggtggaaaagaacgaatggcaggatttcctcctcttgttgctgaagacattatgttaaaagaaggactgggggcatctgaagcagtggccgacatcaagttttcctctgcaggttgggtttcagtaacacctaattttaaggacagactgcatctccgaggctatacacctgaaggaacagttttgaccgtccggccccctctcttgccatatattgttaacatcaaaggacagcgcatcaagaaaagtgtggcctataaaaccaagaagcctccntncccttatgtacaacgtgaggaagaagaaagggaaagataatggtntganaccgaccttgntcnctccaaatattacctgtatggaacccaacaaaatacattgaanttgnattaaacatataacgcaaaataagccncccatnctnaaaaaaaaaaaaaangggcggccncncccnnaagggngncgaataagctaantaccngancctggnccccnggtgaaananccngaaggnccncaaacncccnngnattnttcaanccnccggtgccncnggggtttttttn

SEQ ID NO: 160 - DNA, 256 bp, Homo Sapiens
ctttgacagagtgcaagacgatgacttgcaaaatgtcgcagctggaacgcaacatagagaccatcatcaacaccttccaccaatactctgtgaagctggggcacccagacaccctgaaccagggggaattcaaagagctggtgcgaaaagatctgcaaaattttctcaagaaggagaataagaatgaaaaggtcatagaacacatcatggaggacctggacacaaatgcagacaagcagctgagcttcgaggagtt

SEQ ID NO: 161 - DNA, 1200 bp, Homo Sapiens
  misc_feature (823)..(823): n is a, c, g, or t
  misc_feature (895)..(895): n is a, c, g, or t
  misc_feature (903)..(903): n is a, c, g, or t
  misc_feature (915)..(915): n is a, c, g, or t
  misc_feature (926)..(926): n is a, c, g, or t
  misc_feature (932)..(932): n is a, c, g, or t
  misc_feature (942)..(942): n is a, c, g, or t
  misc_feature (945)..(945): n is a, c, g, or t
  misc_feature (957)..(957): n is a, c, g, or t
  misc_feature (985)..(985): n is a, c, g, or t
  misc_feature (998)..(998): n is a, c, g, or t
  misc_feature (1005)..(1005): n is a, c, g, or t
  misc_feature (1038)..(1038): n is a, c, g, or t
  misc_feature (1057)..(1058): n is a, c, g, or t
  misc_feature (1062)..(1062): n is a, c, g, or t
  misc_feature (1074)..(1075): n is a, c, g, or t
  misc_feature (1098)..(1098): n is a, c, g, or t
  misc_feature (1107)..(1107): n is a, c, g, or t
  misc_feature (1126)..(1126): n is a, c, g, or t
  misc_feature (1135)..(1135): n is a, c, g, or t
  misc_feature (1150)..(1150): n is a, c, g, or t
  misc_feature (1153)..(1153): n is a, c, g, or t
  misc_feature (1161)..(1161): n is a, c, g, or t
  misc_feature (1167)..(1167): n is a, c, g, or t
  misc_feature (1171)..(1171): n is a, c, g, or t
  misc_feature (1179)..(1180): n is a, c, g, or t
  misc_feature (1186)..(1186): n is a, c, g, or t
  misc_feature (1188)..(1188): n is a, c, g, or t
  misc_feature (1190)..(1190): n is a, c, g, or t
  misc_feature (1192)..(1192): n is a, c, g, or t
  misc_feature (1195)..(1195): n is a, c, g, or t
tagagaaattactatgagaggatcgcatcaccatcaccatcacggatcctatttaggtgacactatagaatcgtcgacccacgcgtccgctcctgttcgacagtcagccgcatcttcttttgcgtcgccagccgagccacatcgctcagacaccatggggaaggtgaaggtcggagtcaacggatttggtcgtattgggcgcctggtcaccagggctgcttttaactctggtaaagtggatattgttgccatcaatgaccccttcattgacctcaactacatggtttacatgttccaatatgattccacccatggcaaattccatggcaccgtcaaggctgagaacgggaagcttgtcatcaatggaaatcccatcaccatcttccaggagcgagatccctccaaaatcaagtggggcgatgctggcgctgagtacgtcgtggagtccactggcgtcttcaccaccatggagaaggctggggctcatttgcaggggggagccaaaagggtcatcatctctgccccctctgctgatgcccccatgttcgtcatgggtgtgaaccatgagaagtatgacaacagcctcaagatcatcagcaatgcctcctgcaccaccaactgcttagcacccctggccaaggtcatccatgacaactttggtatcgtggaaggactcatgaccacagtccatgccatcactgccacccagaagactgtggatggcccctccgggaaactgtggcgtgatggccgcggggctctccagaacatcatccctgcctctactggcgctgccaaggctgtgggcaaggtcatccctganctgaacgggaagctcactggcatggccttccgtgtccccactgccaacgtgtcagtggtggacctgacctgnccgtctanaaaaacctgccnaatatgatganatcaanaaggtggtgnaancaggcgtcgganggccccctcaagggcatcctggggctancctgaacaccagnggtctcntctgaattcaaaagcgaaacccactcctccacntttgaacgctggggctggnnttgncctcaacaaccnntttttcaagcttattcctgggangaaaccaanttggctacagcaacagggngggggaccncatggccccaatggnccncaaggaanaaaaancccnggaacccnncccccncnananccnaaaag

SEQ ID NO: 162 - DNA, 256 bp, Homo Sapiens
taagaggagaattaactatgagaggatcgcatcaccatcaccatcacggatcctatttaggtgacactatagaatcgtcgacccacgcgtccgagaccttctcctcttcctcctcatccaagaagatgggcagcatcttcgaccgcgaggaccaggccagcccacgggccggcagcctggcggcgctcgagaaacggcaggccgagaagaagaaagagctgatgaaggcgcagagtctgcccaagacctcagcctc

SEQ ID NO: 163 - DNA, 256 bp, Homo Sapiens
gccatgagactaagcgtaaacttccacggggggctgaggacagggaggataaatccaacaaggggacactgcggccagccaaaagcatggactcactgagtgctgcagctggggccagtgatgagccagaggggctggtggggcccagcagcccccggccaagcccattgctgcctgagagcttggagaacgattctatagaggcagcagagggtgaacaggagcctgaggcagaagcactgggtggcacaaactc

SEQ ID NO: 164 - DNA, 1200 bp, Homo Sapiens
  misc_feature (806)..(806): n is a, c, g, or t
  misc_feature (826)..(826): n is a, c, g, or t
  misc_feature (842)..(842): n is a, c, g, or t
  misc_feature (867)..(867): n is a, c, g, or t
  misc_feature (869)..(869): n is a, c, g, or t
  misc_feature (872)..(872): n is a, c, g, or t
  misc_feature (875)..(875): n is a, c, g, or t
  misc_feature (890)..(890): n is a, c, g, or t
  misc_feature (924)..(924): n is a, c, g, or t
  misc_feature (935)..(935): n is a, c, g, or t
  misc_feature (943)..(943): n is a, c, g, or t
  misc_feature (960)..(960): n is a, c, g, or t
  misc_feature (963)..(963): n is a, c, g, or t
  misc_feature (965)..(965): n is a, c, g, or t
  misc_feature (969)..(969): n is a, c, g, or t
  misc_feature (971)..(971): n is a, c, g, or t
  misc_feature (980)..(980): n is a, c, g, or t
  misc_feature (990)..(990): n is a, c, g, or t
  misc_feature (997)..(997): n is a, c, g, or t
  misc_feature (1009)..(1009): n is a, c, g, or t
  misc_feature (1017)..(1017): n is a, c, g, or t
  misc_feature (1019)..(1019): n is a, c, g, or t
  misc_feature (1026)..(1027): n is a, c, g, or t
  misc_feature (1029)..(1030): n is a, c, g, or t
  misc_feature (1034)..(1034): n is a, c, g, or t
  misc_feature (1037)..(1037): n is a, c, g, or t
  misc_feature (1041)..(1041): n is a, c, g, or t
  misc_feature (1045)..(1046): n is a, c, g, or t
  misc_feature (1048)..(1048): n is a, c, g, or t
  misc_feature (1051)..(1051): n is a, c, g, or t
  misc_feature (1058)..(1058): n is a, c, g, or t
  misc_feature (1066)..(1067): n is a, c, g, or t
  misc_feature (1069)..(1069): n is a, c, g, or t
  misc_feature (1074)..(1074): n is a, c, g, or t
  misc_feature (1077)..(1077): n is a, c, g, or t
  misc_feature (1084)..(1084): n is a, c, g, or t
  misc_feature (1098)..(1098): n is a, c, g, or t
  misc_feature (1103)..(1103): n is a, c, g, or t
  misc_feature (1105)..(1105): n is a, c, g, or t
  misc_feature (1118)..(1119): n is a, c, g, or t
  misc_feature (1129)..(1129): n is a, c, g, or t
  misc_feature (1140)..(1140): n is a, c, g, or t
  misc_feature (1146)..(1146): n is a, c, g, or t
  misc_feature (1149)..(1149): n is a, c, g, or t
  misc_feature (1159)..(1161): n is a, c, g, or t
  misc_feature (1164)..(1164): n is a, c, g, or t
  misc_feature (1166)..(1166): n is a, c, g, or t
  misc_feature (1168)..(1169): n is a, c, g, or t
  misc_feature (1171)..(1171): n is a, c, g, or t
  misc_feature (1180)..(1180): n is a, c, g, or t
  misc_feature (1184)..(1184): n is a, c, g, or t
aatagagaaaattactatgagaggatcgcatcaccatcaccatcacggatcctatttaggtgacactatagaatcgtcgacccacgcgtccgcccacgcgtccggaaacccacgccacccgcgtcatcgcccttatcaacgaccagcgccgggctgccttggagggcttcctggcagccctgcaggcagatccgcctcaggcggagcgtgtcctgttggccctgcggcgctacctgcgtgcggagcagaaggaacagaggcacacgctgcgccactaccagcatgtggccgccgtggatcccgagaaggcacagcagatgcgcttccaggtgcatacccaccttcaagtgattgaggagagggtgaatcagagcctgggcctgcttgaccagaacccccacctggctcaggagctgcggccccaaatccaggaactcctccactctgaacacctgggtcccagtgaattggaagcccctgcccctgggggcagcagcgaggacaagggtgggctgcagcctccagattccaaggatgcagacacccccatgacccttccaaaagggtccacagaacaagatgctgcatcccctgagaaagagaagatgaacccgctggaacagtatgagcgaaaggtgaatgcgtctgttccaaggggtttccctttccactcatcggagattcagagggatgagctggcaccagctgggacaggggtgtcccgtgaggctgtgtcgggtctgctgatcatgggagcgggcggaggctccctcatcgtcctctccatgctgctcctgcgcaggaanaagccctacggggctatcanccatggcgtggtggangtggaccccatgctgaccctggagnancancanctccgcgaactgcancggcacggctatgaaaaccccacttaccgcttcntggaagaaacnaccctganccggcccccttcacccnttnanccgnancccaaaacntccccttttnctggaanccccaaaacccnaattcccnancttaggnnannaggnaancttnaaannantcntttcaancccttttnntnaaaanggntggaaantttttattttcccntttcnanttccaaaatttcnntccctaaaantttccaaaaantcccanaanccctccccannnggnancnncnccccttaantttntttttaaatttttttt

SEQ ID NO: 165 - DNA, 256 bp, Homo Sapiens
  misc_feature (4)..(4): n is a, c, g, or t
  misc_feature (130)..(130): n is a, c, g, or t
  misc_feature (224)..(224): n is a, c, g, or t
taanaggagaattaactatgagaggatcgcatcaccatcaccatcacggatcctatttaggtgacactatagaatcgtcgacccacgcgtccgggacccgggacgacgagtacgactacctattcaaagnggtgctcatcggggactcaggcgtgggcaagagcaacctgctgtcgcgcttcacccgcaacgagttcaacctggagagcaagagcaccatcggngtggagttcgccacccgcagcatccaggtgga

SEQ ID NO: 166 - DNA, 1230 bp, Homo Sapiens
  misc_feature (855)..(855): n is a, c, g, or t
  misc_feature (867)..(867): n is a, c, g, or t
  misc_feature (904)..(904): n is a, c, g, or t
  misc_feature (919)..(919): n is a, c, g, or t
  misc_feature (928)..(928): n is a, c, g, or t
  misc_feature (968)..(968): n is a, c, g, or t
  misc_feature (974)..(974): n is a, c, g, or t
  misc_feature (981)..(982): n is a, c, g, or t
  misc_feature (997)..(997): n is a, c, g, or t
  misc_feature (1002)..(1002): n is a, c, g, or t
  misc_feature (1015)..(1016): n is a, c, g, or t
  misc_feature (1028)..(1028): n is a, c, g, or t
  misc_feature (1046)..(1046): n is a, c, g, or t
  misc_feature (1064)..(1064): n is a, c, g, or t
  misc_feature (1069)..(1070): n is a, c, g, or t
  misc_feature (1072)..(1072): n is a, c, g, or t
  misc_feature (1088)..(1088): n is a, c, g, or t
  misc_feature (1101)..(1102): n is a, c, g, or t
  misc_feature (1108)..(1108): n is a, c, g, or t
  misc_feature (1111)..(1111): n is a, c, g, or t
  misc_feature (1114)..(1116): n is a, c, g, or t
  misc_feature (1122)..(1123): n is a, c, g, or t
  misc_feature (1136)..(1136): n is a, c, g, or t
  misc_feature (1138)..(1138): n is a, c, g, or t
  misc_feature (1144)..(1146): n is a, c, g, or t
  misc_feature (1152)..(1152): n is a, c, g, or t
  misc_feature (1170)..(1170): n is a, c, g, or t
  misc_feature (1180)..(1180): n is a, c, g, or t
  misc_feature (1199)..(1200): n is a, c, g, or t
  misc_feature (1217)..(1218): n is a, c, g, or t
  misc_feature (1224)..(1224): n is a, c, g, or t
attagagaaattactatgagaggatcgcatcaccatcaccatcacggatcctatttaggtgacactatagaatcgtcgacccacgcgtccgcgctgcttggcgacacggccgtgatccaaggggacacggccctaatcacgcggccctggagccccgctcgtaggccagaggtcgatggagtccgcaaagccctgcaagacctggggctccgaattgtggaaataggagacgagaacgcgacgctggatggcactgacgttctcttcaccggccgggagtttttcgtaggcctctccaaatggaccaatcaccgaggagctgagatcgtggcggacacgttccgggacttcgccgtctccactgtgccagtctcgggtccctcccacctgcgcggtctctgcggcatggggggacctcgcactgttgtggcaggcagcagcgacgctgcccaaaaggctgtccgggcaatggcagtgctgacagatcacccatatgcctccctgaccctcccagatgacgcagctgctgactgtctctttcttcgtcctgggttgcctggtgtgcctcctttcctcctgcaccgtggaggtggggatctgcccaacagccaggaggcactgcagaagctctctgatgtcaccctggtacctgtgtcctgctcagaactggagaaggctggcgccgggctcagctccctctgcttggtgctcagcacacgcccccacagctgagggcctggccttggggtactgctggccaggggtaggatagtataggaagtagaaggggaaggagggttagatagagaatgctgaataggcagtagttgggagagagcctcaatattgggggangggagagtgtanggaaaaaggatccactgggtgaatccctccctctcanaaccaataaaaatanaattgaacnttttaaaaaaaaaaaaaaaaaaaaggggcggccgctcccntatagngagtccnnattaagcttaattanctgancttggaactcctnnttgaaaaatccngtaaagaccctccaaacncccttcgggaattttttnaaaanncncggttgcccccggggntttttttttttgnnaaaatnaanctnnnttgggnnaaattttcggaantnaaggannntaaatnggaaaaaaattcctgggnataacccccngtaaattttcccagggccnntaaaaaaatttttgggnntttccnccgttc

SEQ ID NO: 167 - DNA, 256 bp, Homo Sapiens
  misc_feature (1)..(3): n is a, c, g, or t
  misc_feature (6)..(6): n is a, c, g, or t
nnnctntgagaggatcgcatcaccatcaccatcacggatcctatttaggtgacactatagaatcgtcgacccacgcgtccgaccacctgccccagatggagaccctcatgctcaacaacaacgctctcagtgccttgcaccagcagacggtggagtccctgcccaacctgcaggaggtaggtctccacggcaaccccatccgctgtgactgtgtcatccgctgggccaatgccacgggcacccgtgtccgcttcat

SEQ ID NO: 168 - DNA, 256 bp, Homo Sapiens
ttaactatgagaggatcgcatcaccatcaccatcacggatcctatttaggtgacactatagaatcgtcgacccacgcgtccggagccactgacgccgggaccgggaccgccgccgccgccgccaccatgagtgatcagcagctggactgtgccttggacctaatgaggcgcctgcctccccagcaaatcgagaaaaacctcagcgacctgatcgacctggtccccagtctatgtgaggatctcctgtcttctgttg

SEQ ID NO: 169 - DNA, 256 bp, Homo Sapiens
  misc_feature (52)..(52): n is a, c, g, or t
  misc_feature (84)..(84): n is a, c, g, or t
  misc_feature (96)..(96): n is a, c, g, or t
  misc_feature (121)..(122): n is a, c, g, or t
  misc_feature (147)..(147): n is a, c, g, or t
  misc_feature (153)..(153): n is a, c, g, or t
  misc_feature (155)..(155): n is a, c, g, or t
  misc_feature (163)..(163): n is a, c, g, or t
  misc_feature (166)..(166): n is a, c, g, or t
  misc_feature (171)..(171): n is a, c, g, or t
  misc_feature (173)..(173): n is a, c, g, or t
  misc_feature (180)..(180): n is a, c, g, or t
  misc_feature (218)..(218): n is a, c, g, or t
  misc_feature (231)..(231): n is a, c, g, or t
  misc_feature (256)..(256): n is a, c, g, or t
ttaaagaggagaattaactatgagagggtcgcatcaccattaccatcacggntcctatttaggtgacactatagaatcgtcganccacgcgttcgnccacgcgttcgggacaccaaggggnnatggtggggattgggccaaaaaganttcttnangggggganganggccnanaaaaaanggggggattctgaacctgaaaaaacccctttgaggatnggattcttccccnaattgggacgaaatgggagaaaaan

SEQ ID NO: 170 - DNA, 256 bp, Homo Sapiens
  misc_feature (3)..(3): n is a, c, g, or t
  misc_feature (18)..(18): n is a, c, g, or t
  misc_feature (42)..(42): n is a, c, g, or t
  misc_feature (244)..(245): n is a, c, g, or t
ttnttaagaggagaaatnactctgagaggatcgatacctacntacggatcctatttaggtgacactatagaatcgtcgacccacgcgtccgctgagattgagcagaagataaggagtacaatgcccagatcaacagcaacctcttcatgagcttgaacaaggacggttcttacacaggcttcatcaaggttcagctgaagctggtgcgccctgtctctgtgccctccagcaagaagccaccctnnttgcaggatgc

SEQ ID NO: 171 - DNA, 1406 bp, Homo Sapiens
  misc_feature (398)..(398): n is a, c, g, or t
  misc_feature (732)..(732): n is a, c, g, or t
  misc_feature (810)..(810): n is a, c, g, or t
  misc_feature (878)..(878): n is a, c, g, or t
  misc_feature (899)..(899): n is a, c, g, or t
  misc_feature (939)..(939): n is a, c, g, or t
  misc_feature (941)..(941): n is a, c, g, or t
  misc_feature (956)..(956): n is a, c, g, or t
  misc_feature (959)..(959): n is a, c, g, or t
  misc_feature (965)..(965): n is a, c, g, or t
  misc_feature (974)..(974): n is a, c, g, or t
  misc_feature (996)..(996): n is a, c, g, or t
  misc_feature (1014)..(1015): n is a, c, g, or t
  misc_feature (1018)..(1018): n is a, c, g, or t
  misc_feature (1022)..(1022): n is a, c, g, or t
  misc_feature (1029)..(1029): n is a, c, g, or t
  misc_feature (1049)..(1049): n is a, c, g, or t
  misc_feature (1061)..(1061): n is a, c, g, or t
  misc_feature (1065)..(1065): n is a, c, g, or t
  misc_feature (1067)..(1068): n is a, c, g, or t
  misc_feature (1082)..(1082): n is a, c, g, or t
  misc_feature (1088)..(1088): n is a, c, g, or t
  misc_feature (1094)..(1094): n is a, c, g, or t
  misc_feature (1098)..(1098): n is a, c, g, or t
  misc_feature (1100)..(1101): n is a, c, g, or t
  misc_feature (1107)..(1108): n is a, c, g, or t
  misc_feature (1119)..(1119): n is a, c, g, or t
  misc_feature (1121)..(1121): n is a, c, g, or t
  misc_feature (1142)..(1143): n is a, c, g, or t
  misc_feature (1152)..(1152): n is a, c, g, or t
  misc_feature (1157)..(1157): n is a, c, g, or t
  misc_feature (1169)..(1170): n is a, c, g, or t
  misc_feature (1187)..(1187): n is a, c, g, or t
  misc_feature (1189)..(1190): n is a, c, g, or t
  misc_feature (1195)..(1195): n is a, c, g, or t
  misc_feature (1209)..(1209): n is a, c, g, or t
  misc_feature (1213)..(1213): n is a, c, g, or t
  misc_feature (1218)..(1218): n is a, c, g, or t
  misc_feature (1224)..(1225): n is a, c, g, or t
  misc_feature (1237)..(1237): n is a, c, g, or t
  misc_feature (1250)..(1252): n is a, c, g, or t
  misc_feature (1262)..(1263): n is a, c, g, or t
  misc_feature (1269)..(1269): n is a, c, g, or t
  misc_feature (1282)..(1282): n is a, c, g, or t
  misc_feature (1286)..(1286): n is a, c, g, or t
  misc_feature (1304)..(1305): n is a, c, g, or t
  misc_feature (1307)..(1308): n is a, c, g, or t
  misc_feature (1310)..(1310): n is a, c, g, or t
  misc_feature (1312)..(1312): n is a, c, g, or t
  misc_feature (1334)..(1334): n is a, c, g, or t
  misc_feature (1342)..(1344): n is a, c, g, or t
  misc_feature (1348)..(1351): n is a, c, g, or t
  misc_feature (1354)..(1354): n is a, c, g, or t
  misc_feature (1357)..(1357): n is a, c, g, or t
  misc_feature (1359)..(1359): n is a, c, g, or t
  misc_feature (1363)..(1363): n is a, c, g, or t
  misc_feature (1365)..(1365): n is a, c, g, or t
  misc_feature (1367)..(1368): n is a, c, g, or t
  misc_feature (1372)..(1373): n is a, c, g, or t
  misc_feature (1397)..(1397): n is a, c, g, or t
  misc_feature (1402)..(1402): n is a, c, g, or t
taattagagagattactatgagaggatcgcatcaccatcaccatcacggatcctatttaggtgacactatagaatcgtcgacccacgcgtccggcccggccgaggcaataagagcggcggcggcggcagcggcggcagcagctcccgcagctcctgctctggtccgcctcggcccggcggcggccatcagccccctcggcctcggctcgaggggcggggagctgcgcgcgcccctcggtccgaccgacaccctccctgcctcgggaacagtaagaccgaggaccagcgcaacgaggagaaggcgcagcgtgaggccaacaaaaagatcgagaagcagctgcagaaggacaagcaggtctaccgggccacgcaccgcctgctgctgctgggtgctgganaatctggtaaaagcaccattgtgaagcagatgaggatcctgcatgttaatgggtttaatggagagggcggcgaagaggacccgcaggctgcaaggagcaacagcgatggtgagaaggcaaccaaagtgcaggacatcaaaaacaacctgaaagaggcgattgaaaccattgtggccgccatgagcaacctggtgccccccgtggagctggccaaccccgagaaccagttcagagtggactacattctgagtgtgatgaacgtgcctgactttgacttccctcccgaattctatgagcatgccaaggctctgtgggaggatgaaggagtgcgtgnctgctacgaacgctccaacgagtaccagctgattgactgtgcccagtacttcctggacaagatcgacgtgatcaagcnaggctgactatgtgccgagcgatcaggacctgcttcgctgccgtgtcctgacttctggaatctttganaccaagttccaggtggaaaanttcaacttccacatgtttgacgtgggtgggccagcgcgantnaacgccccaagttgnatnccagtnctttcaacnatttgactgcccatcattcttngtgggtggccagcaacanntancaanttggttnttcgggaaggaaaaccaaancaaccccctgcnggangnntttgaacctctttnaaaacnttttgnaaanannaaatgnntgcccccattntngtttatcctttttctcaaaannaaaattttntcctnaaaaatcctttnnttgaaatcaaaattaanannttttncaaattttttcctncctnctctngaaganntcttcccaaccngaaaaaaccctgnnncccggcaaanntttttntaaaaattttttnaatnccccctccgggaaagggnncnnantncccctttccgggggggaaaatnaaatcccnnnttannnnggnaantntagngncnntttnnaaatttttagagaccccttttatncctanaatt

SEQ ID NO: 172 - DNA, 1345 bp, Homo Sapiens
  misc_feature (3)..(3): n is a, c, g, or t
  misc_feature (858)..(858): n is a, c, g, or t
  misc_feature (867)..(867): n is a, c, g, or t
  misc_feature (909)..(909): n is a, c, g, or t
  misc_feature (940)..(940): n is a, c, g, or t
  misc_feature (943)..(943): n is a, c, g, or t
  misc_feature (945)..(945): n is a, c, g, or t
  misc_feature (949)..(950): n is a, c, g, or t
  misc_feature (956)..(956): n is a, c, g, or t
  misc_feature (968)..(968): n is a, c, g, or t
  misc_feature (974)..(974): n is a, c, g, or t
  misc_feature (1000)..(1000): n is a, c, g, or t
  misc_feature (1008)..(1008): n is a, c, g, or t
  misc_feature (1018)..(1018): n is a, c, g, or t
  misc_feature (1029)..(1029): n is a, c, g, or t
  misc_feature (1045)..(1045): n is a, c, g, or t
  misc_feature (1050)..(1051): n is a, c, g, or t
  misc_feature (1056)..(1059): n is a, c, g, or t
  misc_feature (1063)..(1063): n is a, c, g, or t
  misc_feature (1066)..(1066): n is a, c, g, or t
  misc_feature (1073)..(1074): n is a, c, g, or t
  misc_feature (1077)..(1077): n is a, c, g, or t
  misc_feature (1079)..(1079): n is a, c, g, or t
  misc_feature (1083)..(1083): n is a, c, g, or t
  misc_feature (1091)..(1093): n is a, c, g, or t
  misc_feature (1101)..(1101): n is a, c, g, or t
  misc_feature (1110)..(1110): n is a, c, g, or t
  misc_feature (1112)..(1112): n is a, c, g, or t
  misc_feature (1115)..(1115): n is a, c, g, or t
  misc_feature (1123)..(1123): n is a, c, g, or t
  misc_feature (1129)..(1130): n is a, c, g, or t
  misc_feature (1132)..(1132): n is a, c, g, or t
  misc_feature (1136)..(1136): n is a, c, g, or t
  misc_feature (1142)..(1143): n is a, c, g, or t
  misc_feature (1161)..(1161): n is a, c, g, or t
  misc_feature (1163)..(1163): n is a, c, g, or t
  misc_feature (1170)..(1170): n is a, c, g, or t
  misc_feature (1176)..(1176): n is a, c, g, or t
  misc_feature (1178)..(1178): n is a, c, g, or t
  misc_feature (1182)..(1182): n is a, c, g, or t
  misc_feature (1184)..(1184): n is a, c, g, or t
  misc_feature (1187)..(1187): n is a, c, g, or t
  misc_feature (1189)..(1189): n is a, c, g, or t
  misc_feature (1191)..(1191): n is a, c, g, or t
  misc_feature (1194)..(1194): n is a, c, g, or t
  misc_feature (1205)..(1206): n is a, c, g, or t
  misc_feature (1208)..(1208): n is a, c, g, or t
  misc_feature (1212)..(1212): n is a, c, g, or t
  misc_feature (1217)..(1217): n is a, c, g, or t
  misc_feature (1227)..(1227): n is a, c, g, or t
  misc_feature (1230)..(1230): n is a, c, g, or t
  misc_feature (1233)..(1233): n is a, c, g, or t
  misc_feature (1235)..(1235): n is a, c, g, or t
  misc_feature (1238)..(1240): n is a, c, g, or t
  misc_feature (1242)..(1242): n is a, c, g, or t
  misc_feature (1244)..(1245): n is a, c, g, or t
  misc_feature (1248)..(1249): n is a, c, g, or t
  misc_feature (1256)..(1256): n is a, c, g, or t
  misc_feature (1259)..(1259): n is a, c, g, or t
  misc_feature (1261)..(1264): n is a, c, g, or t
  misc_feature (1272)..(1272): n is a, c, g, or t
  misc_feature (1275)..(1276): n is a, c, g, or t
  misc_feature (1278)..(1279): n is a, c, g, or t
  misc_feature (1282)..(1283): n is a, c, g, or t
  misc_feature (1286)..(1288): n is a, c, g, or t
  misc_feature (1295)..(1295): n is a, c, g, or t
  misc_feature (1298)..(1300): n is a, c, g, or t
  misc_feature (1304)..(1304): n is a, c, g, or t
  misc_feature (1308)..(1311): n is a, c, g, or t
  misc_feature (1315)..(1316): n is a, c, g, or t
  misc_feature (1318)..(1318): n is a, c, g, or t
  misc_feature (1321)..(1321): n is a, c, g, or t
  misc_feature (1323)..(1325): n is a, c, g, or t
  misc_feature (1327)..(1327): n is a, c, g, or t
  misc_feature (1331)..(1334): n is a, c, g, or t
  misc_feature (1337)..(1337): n is a, c, g, or t
  misc_feature (1339)..(1345): n is a, c, g, or t
atngaggaaattactatgagaggatcgcatcaccatcaccatcacggatcctatttaggtgacactatagaatcgtcgacccacgcgtccgcagagccttcccactgtggacacctcggcccaggcggcccctcagacctacgccgaatatgccatctcacagcctctggaaggggctggggccacgtgccccacagggtcagagcccctggcaggagagacgcccaaccaggccctgaaacccggggcaaaatccaacagcatcattgtgagccctcggcagaggggcaatcccgtactgaagttcgtgcgcaacgtgccctgggaatttggcgacgtaattcccgactatgtgctgggccagagcacctgtgccctgttcctcagcctccgctaccacaacctgcacccagactacatccatgggcggctgcagagcctggggaagaacttcgccttgcgggtcctgcttgtccaggtggatgtgaaagatccccagcaggccctcaaggagctggctaagatgtgtatcctggccgactgcacattgatcctcgcctggagccccgaggaagctgggcggtacctggagacctacaaggcctatgagcagaaaccagcggacctcctgatggagaagctagagcaggacttcgtctcccggtctctggaacagctcatcgccgcatcaagagaagatctggccttatgcccaggcctgggccctcagaaagcccggaggctgtttgatgtcctgcacgagcccttcttgaaagtaccctgatgaccccagctgccaaggaaacccccagtgtaataataaatcgtcctcccaggccagggctcctgctggctgcnctggtgcantctctgggggaggggattctgggggtgtcaccttctggtggncccaggtggggcaccttcagcttttctttanttncntcanntttccnggggggcaaaantaaaanagggctggctgctggctgctttcttnccgctttnttgtcccggncttgtgggaancctcctcccccaaaanttttnnaattnnnntggnggnccttggnnttntncttnttgggggnnnttgttttntggggaatncnggntttttccngaaacnngntttntttccnntttttggggggaatcccngnaaatttnccctgngntttncnggntntnccntccccctgggnnantttnagggntttaaggggnttnaantnggnnncnannccnnggggggnaancnnnncccttttnttnntnnttnnttnnnggggggnaannngggnaaannnncccnnanagncnnnanggtnnnnccngnnnnnnn

SEQ ID NO: 173 - DNA, 256 bp, Homo Sapiens
  misc_feature (5)..(5): n is a, c, g, or t
  misc_feature (43)..(43): n is a, c, g, or t
  misc_feature (53)..(53): n is a, c, g, or t
tcggnaatataaaaaattatttgctttgtgagcggatacaatntaatagattnattgtgagcggataacaatttacacagaattattaaagaggagaaattaactatgagaggatcgcatcaccatcaccatcacggatcctatttaggtgacactatagaatcgtcgacccacgcgtccgcccacgcgtccgaattcgtgatggcgggggctggttccgccgctgtatcgggggcagggaccccggtggcggggc

SEQ ID NO: 174 - DNA, 1202 bp, Homo Sapiens
  misc_feature (886)..(929): n is a, c, g, or t
  misc_feature (931)..(932): n is a, c, g, or t
  misc_feature (934)..(934): n is a, c, g, or t
  misc_feature (943)..(943): n is a, c, g, or t
  misc_feature (945)..(946): n is a, c, g, or t
  misc_feature (952)..(953): n is a, c, g, or t
  misc_feature (956)..(956): n is a, c, g, or t
  misc_feature (963)..(963): n is a, c, g, or t
  misc_feature (970)..(970): n is a, c, g, or t
  misc_feature (972)..(973): n is a, c, g, or t
  misc_feature (983)..(983): n is a, c, g, or t
  misc_feature (987)..(987): n is a, c, g, or t
  misc_feature (993)..(993): n is a, c, g, or t
  misc_feature (997)..(998): n is a, c, g, or t
  misc_feature (1003)..(1004): n is a, c, g, or t
  misc_feature (1006)..(1006): n is a, c, g, or t
  misc_feature (1011)..(1012): n is a, c, g, or t
  misc_feature (1018)..(1018): n is a, c, g, or t
  misc_feature (1024)..(1024): n is a, c, g, or t
  misc_feature (1031)..(1031): n is a, c, g, or t
  misc_feature (1036)..(1036): n is a, c, g, or t
  misc_feature (1051)..(1051): n is a, c, g, or t
  misc_feature (1059)..(1059): n is a, c, g, or t
  misc_feature (1062)..(1062): n is a, c, g, or t
  misc_feature (1064)..(1066): n is a, c, g, or t
  misc_feature (1069)..(1069): n is a, c, g, or t
  misc_feature (1075)..(1075): n is a, c, g, or t
  misc_feature (1086)..(1086): n is a, c, g, or t
  misc_feature (1089)..(1091): n is a, c, g, or t
  misc_feature (1093)..(1095): n is a, c, g, or t
  misc_feature (1101)..(1101): n is a, c, g, or t
  misc_feature (1103)..(1103): n is a, c, g, or t
  misc_feature (1108)..(1109): n is a, c, g, or t
  misc_feature (1113)..(1115): n is a, c, g, or t
  misc_feature (1117)..(1119): n is a, c, g, or t
  misc_feature (1121)..(1122): n is a, c, g, or t
  misc_feature (1126)..(1127): n is a, c, g, or t
  misc_feature (1129)..(1129): n is a, c, g, or t
  misc_feature (1131)..(1131): n is a, c, g, or t
  misc_feature (1134)..(1134): n is a, c, g, or t
  misc_feature (1138)..(1138): n is a, c, g, or t
  misc_feature (1144)..(1145): n is a, c, g, or t
  misc_feature (1154)..(1154): n is a, c, g, or t
  misc_feature (1157)..(1157): n is a, c, g, or t
  misc_feature (1167)..(1167): n is a, c, g, or t
  misc_feature (1170)..(1170): n is a, c, g, or t
  misc_feature (1172)..(1172): n is a, c, g, or t
  misc_feature (1185)..(1185): n is a, c, g, or t
  misc_feature (1190)..(1193): n is a, c, g, or t
  misc_feature (1195)..(1196): n is a, c, g, or t
  misc_feature (1199)..(1199): n is a, c, g, or t
  misc_feature (1202)..(1202): n is a, c, g, or t
tagaggaaaattacctatgagaggatcgcatcaccatcaccattcacggatcctatttaggtgacactatagaatcgtcgacccacgcgtccgcccacgcgtccgcccacgcgtccgcccacgcgtccgcccacgcgtccgggcgccgcgggaccatggcggcggcggcggacgagcggagtccagaggacggagaagacgaggaagaggaggagcagttggttctggtggaattatcaggaattattgattcagacttcctctcaaaatgtgaaaataaatgcaaggttttgggcattgacactgagaggcccattctgcaagtggacagctgtgtctttgctggggagtatgaagacactctagggacctgtgttatatttgaagaaaatgttgaacatgctgatacagaaggcaataataaaacagtgctaaaatataaatgccatacaatgaagaagctcagcatgacaagaactctcctgacagagaagaaggaaggagaagaaaacataggtggggtggaatggctgcaaataaaggataatgatttctcctatcgacccaacatgatttgtaactttctacatgaaaatgaagacgaagaagtggtagcttcagccccagataaatctttggaattggaagaggaagagattcaaatgaacgacagttcaaacctgagttgtgaacaggagaaaccaatgcacttggaaatagaagattctggtcctcttattgatataccttctgagacagaaggttctgtttttatggaaactcaaatgctgccttagaaatcactcctagatgaaatgtttctcataataacttgtcaagaactttttagagttggttacataaaaataattgctgtgtaaaaaannnnnnnnnnnnnnnnnnnnnnnnnnnnnnnnnnnnnnnnnnnngnngnccccccccnanngggggnnccnccccttnattggcncnnattgaccttntttnttaaanttgnnccccnntnaaaanncctttnggaacncccaaanccccncgggatttttcaaantttttttngcncnnngcntttttntttgggggaanttnnncnnnttgggnanttttnngggnnnannnannctgnngnanaanattnttgttnnccccctttnaancccctttggngcntnaaaaattttgggnttccnnnntnnccngtn

SEQ ID NO: 175 - DNA, 1382 bp, Homo Sapiens
  misc_feature (14)..(14): n is a, c, g, or t
  misc_feature (697)..(697): n is a, c, g, or t
  misc_feature (707)..(709): n is a, c, g, or t
  misc_feature (711)..(742): n is a, c, g, or t
  misc_feature (787)..(787): n is a, c, g, or t
  misc_feature (792)..(792): n is a, c, g, or t
  misc_feature (811)..(811): n is a, c, g, or t
  misc_feature (897)..(897): n is a, c, g, or t
  misc_feature (921)..(921): n is a, c, g, or t
  misc_feature (930)..(930): n is a, c, g, or t
  misc_feature (959)..(959): n is a, c, g, or t
  misc_feature (963)..(963): n is a, c, g, or t
  misc_feature (966)..(966): n is a, c, g, or t
  misc_feature (973)..(974): n is a, c, g, or t
  misc_feature (981)..(981): n is a, c, g, or t
  misc_feature (988)..(988): n is a, c, g, or t
  misc_feature (997)..(997): n is a, c, g, or t
  misc_feature (1009)..(1009): n is a, c, g, or t
  misc_feature (1012)..(1013): n is a, c, g, or t
  misc_feature (1015)..(1015): n is a, c, g, or t
  misc_feature (1018)..(1018): n is a, c, g, or t
  misc_feature (1021)..(1021): n is a, c, g, or t
  misc_feature (1025)..(1025): n is a, c, g, or t
  misc_feature (1038)..(1038): n is a, c, g, or t
  misc_feature (1041)..(1041): n is a, c, g, or t
  misc_feature (1043)..(1044): n is a, c, g, or t
  misc_feature (1048)..(1048): n is a, c, g, or t
  misc_feature (1062)..(1062): n is a, c, g, or t
  misc_feature (1078)..(1079): n is a, c, g, or t
  misc_feature (1090)..(1090): n is a, c, g, or t
  misc_feature (1097)..(1097): n is a, c, g, or t
  misc_feature (1102)..(1102): n is a, c, g, or t
  misc_feature (1105)..(1105): n is a, c, g, or t
  misc_feature (1113)..(1113): n is a, c, g, or t
  misc_feature (1118)..(1118): n is a, c, g, or t
  misc_feature (1132)..(1132): n is a, c, g, or t
  misc_feature (1136)..(1136): n is a, c, g, or t
  misc_feature (1139)..(1139): n is a, c, g, or t
  misc_feature (1143)..(1143): n is a, c, g, or t
  misc_feature (1148)..(1149): n is a, c, g, or t
  misc_feature (1163)..(1163): n is a, c, g, or t
  misc_feature (1166)..(1167): n is a, c, g, or t
  misc_feature (1173)..(1174): n is a, c, g, or t
  misc_feature (1177)..(1177): n is a, c, g, or t
  misc_feature (1181)..(1181): n is a, c, g, or t
  misc_feature (1185)..(1185): n is a, c, g, or t
  misc_feature (1188)..(1189): n is a, c, g, or t
  misc_feature (1191)..(1191): n is a, c, g, or t
  misc_feature (1196)..(1196): n is a, c, g, or t
  misc_feature (1220)..(1221): n is a, c, g, or t
  misc_feature (1224)..(1224): n is a, c, g, or t
  misc_feature (1226)..(1227): n is a, c, g, or t
  misc_feature (1233)..(1233): n is a, c, g, or t
  misc_feature (1237)..(1237): n is a, c, g, or t
  misc_feature (1255)..(1256): n is a, c, g, or t
  misc_feature (1258)..(1258): n is a, c, g, or t
  misc_feature (1265)..(1268): n is a, c, g, or t
  misc_feature (1272)..(1272): n is a, c, g, or t
  misc_feature (1275)..(1276): n is a, c, g, or t
  misc_feature (1278)..(1278): n is a, c, g, or t
  misc_feature (1283)..(1283): n is a, c, g, or t
  misc_feature (1285)..(1285): n is a, c, g, or t
  misc_feature (1289)..(1289): n is a, c, g, or t
  misc_feature (1295)..(1295): n is a, c, g, or t
  misc_feature (1298)..(1299): n is a, c, g, or t
  misc_feature (1301)..(1301): n is a, c, g, or t
  misc_feature (1308)..(1308): n is a, c, g, or t
  misc_feature (1311)..(1311): n is a, c, g, or t
  misc_feature (1314)..(1314): n is a, c, g, or t
  misc_feature (1317)..(1317): n is a, c, g, or t
  misc_feature (1320)..(1320): n is a, c, g, or t
  misc_feature (1326)..(1328): n is a, c, g, or t
  misc_feature (1332)..(1332): n is a, c, g, or t
  misc_feature (1338)..(1338): n is a, c, g, or t
  misc_feature (1345)..(1345): n is a, c, g, or t
  misc_feature (1353)..(1353): n is a, c, g, or t
  misc_feature (1355)..(1357): n is a, c, g, or t
  misc_feature (1361)..(1361): n is a, c, g, or t
  misc_feature (1367)..(1367): n is a, c, g, or t
  misc_feature (1369)..(1369): n is a, c, g, or t
  misc_feature (1373)..(1373): n is a, c, g, or t
  misc_feature (1379)..(1379): n is a, c, g, or t
  misc_feature (1382)..(1382): n is a, c, g, or t
aatagagagattanctatgagaggatcgcatcaccatcaccatcacggatcctatttaggtgacactatagaatcgtcgacccacgcgtccggtggttcccaaagatgtcaatgctgccattgccaccatcaagaccaagcgtaccatccagtttgtggattggtgccccactggcttcaaggttggcatcaactaccagcctcccactgtggtgcctggtggagacctggccaaggtacagagagctgtgtgcatgctgagcaacaccacagccattgctgaggcctgggctcgcctggaccacaagtttgacctgatgtatgccaaacgtgcctttgttcactggtacgttggggaggggatggaggaaggtgagttttcagaggcccgtgaggacatggctgcccttgagaaggattatgaggaggttggtgtggattctgttgaaggagagggtgaggaagaaggagaggaatactaaagttaaaacgtcacaaaggtgctgcttttacagggaagcttattctgttttaaacattgaaaagttgtggtctgatcagttaatttgtatgtagcagtgtatgctctcatatacaattactgacctatgctctaaaacatgaatgctttgttacagacccaagctgtccatttctgtgatgggttttgaataaagtattccctgtcttaaatganaaaaaaaaannnannnnnnnnnnnnnnnnnnnnnnnnnnnnnnnnaaagggcggccgctccctatagtgagtcgtattaagcttaattanctgancttggactcctgttgatanatccagtaatgacctcaaaactccatctggatttgttcaaaacgctcggttgcccccgggcgtttttttattggtgaaaatccaanctagcttggcgaaattttccgganctaaggaanctaaaatggaaaaaaaaatccctggatanaccnccnttgaaanntcccaanggcaccnaaaaaaaantttgaggcattncanncnttnccncaangaacctaaaaccnaancnnttcncctggaattaacgncctttttaaaaaccgnnaaaaaaaaaancccaaanttttnccnggcctttnttccnatttttgccccccngaanaangccnccccnnaatttcctaatggnaannaaaaannggnaacngggnaanngnaaaangttccccttttaacccttttcccnnaananngaaaantttnccccccggaagaaaaacnnanaatttcnnnntttncannanatttncnaaangggggnttnngnaaacccnccnttnccnaanggtttnnnaaantttttnccccccnccccgggnannncccnttttanancccnaaaaanctn

SEQ ID NO: 176 - DNA, 1200 bp, Homo Sapiens
  misc_feature (684)..(684): n is a, c, g, or t
  misc_feature (785)..(785): n is a, c, g, or t
  misc_feature (835)..(835): n is a, c, g, or t
  misc_feature (878)..(878): n is a, c, g, or t
  misc_feature (880)..(880): n is a, c, g, or t
  misc_feature (892)..(892): n is a, c, g, or t
  misc_feature (905)..(906): n is a, c, g, or t
  misc_feature (912)..(912): n is a, c, g, or t
  misc_feature (914)..(914): n is a, c, g, or t
  misc_feature (917)..(917): n is a, c, g, or t
  misc_feature (924)..(924): n is a, c, g, or t
  misc_feature (935)..(935): n is a, c, g, or t
  misc_feature (948)..(948): n is a, c, g, or t
  misc_feature (950)..(950): n is a, c, g, or t
  misc_feature (971)..(971): n is a, c, g, or t
  misc_feature (973)..(973): n is a, c, g, or t
  misc_feature (998)..(998): n is a, c, g, or t
  misc_feature (1004)..(1004): n is a, c, g, or t
  misc_feature (1013)..(1013): n is a, c, g, or t
  misc_feature (1015)..(1015): n is a, c, g, or t
  misc_feature (1020)..(1020): n is a, c, g, or t
  misc_feature (1042)..(1042): n is a, c, g, or t
  misc_feature (1047)..(1047): n is a, c, g, or t
  misc_feature (1056)..(1056): n is a, c, g, or t
  misc_feature (1060)..(1060): n is a, c, g, or t
  misc_feature (1072)..(1072): n is a, c, g, or t
  misc_feature (1096)..(1096): n is a, c, g, or t
  misc_feature (1109)..(1109): n is a, c, g, or t
  misc_feature (1111)..(1111): n is a, c, g, or t
  misc_feature (1120)..(1120): n is a, c, g, or t
  misc_feature (1123)..(1123): n is a, c, g, or t
  misc_feature (1132)..(1132): n is a, c, g, or t
  misc_feature (1137)..(1137): n is a, c, g, or t
  misc_feature (1145)..(1145): n is a, c, g, or t
  misc_feature (1169)..(1169): n is a, c, g, or t
  misc_feature (1171)..(1171): n is a, c, g, or t
  misc_feature (1176)..(1177): n is a, c, g, or t
  misc_feature (1194)..(1194): n is a, c, g, or t
  misc_feature (1196)..(1196): n is a, c, g, or t
  misc_feature (1198)..(1198): n is a, c, g, or t
  misc_feature (1200)..(1200): n is a, c, g, or t
aatagagaaattactatgagaggatcgcatcaccatcaccatcacggatcctatttaggtgacactatagaatcgtcgacccacgcgtccgacaacatcgtcactaaaactgacacaaatccttctgaaagcactcctgtttcctgctatccatgtaaccgagtgaaaactgattctgtggacctgaaatccccgtttggaagtccttctgctgaagctgtgtcctctcggctctcatggcctaaccattattcaggagcatcagaaagccagaccaggagtgacttcctgctggatccaagcaggagttatagttaccctagacaaaagacgccaggcacaccaaagagaaactgcccagcaccttttgattttgatggctgtgagctcctggccagccccactagcccagtcactgcagaattcagtagcagcgtctctggttgtcccaagtcagccagctactctctggagagcacagatgtgaaatctcttgcagctggtgtgacaaagcagagtacgtcatgccctgccttaccccccagggctccaaaactagtggaagagaaggtcgcctccgaaacatctcctttgcctctgaaaattgatggtgctgaggaagaccccaagtctgggtcaccagatctctcggaggaccagtattttgttaaaaagggcatgcangacatcttctctgcctcctaccctttctcatctccgctccatctccagctggcccccagatcctgtggcgacggttccccatggcagccacctgctgaccntatcaggactctctatagaggaagtgtccaagtcactacggttcattggnttgtccgaaagatgtcatatcatttctttgttactgaaaaaantngatggggaaccntgctttgtttcannctaacngnaanaaaatcnttctccaaagnatttcaaattgancnaaattgccagggtgaaaaaananaatggcaaattcattaaatgggctnggaggncccaaaaananaaccnaaataaaccccccgggccagcnttggnaaaaaaacngaantcaatggcgtgntgccaaaaaaggggggggctgggnaaaccaattttcntnttttttccnctnaaaaacttnttctngtaaaaangggaaaaaaaaaactcttaatatncnaaatnntttttttaaaggggaanangntn

SEQ ID NO: 177 - DNA, 1478 bp, Homo Sapiens
  misc_feature (212)..(212): n is a, c, g, or t
  misc_feature (227)..(227): n is a, c, g, or t
  misc_feature (230)..(230): n is a, c, g, or t
  misc_feature (348)..(348): n is a, c, g, or t
  misc_feature (369)..(369): n is a, c, g, or t
  misc_feature (393)..(393): n is a, c, g, or t
  misc_feature (408)..(408): n is a, c, g, or t
  misc_feature (417)..(417): n is a, c, g, or t
  misc_feature (436)..(436): n is a, c, g, or t
  misc_feature (455)..(455): n is a, c, g, or t
  misc_feature (466)..(466): n is a, c, g, or t
  misc_feature (474)..(474): n is a, c, g, or t
  misc_feature (477)..(477): n is a, c, g, or t
  misc_feature (481)..(481): n is a, c, g, or t
  misc_feature (496)..(496): n is a, c, g, or t
  misc_feature (500)..(500): n is a, c, g, or t
  misc_feature (508)..(508): n is a, c, g, or t
  misc_feature (513)..(513): n is a, c, g, or t
  misc_feature (519)..(519): n is a, c, g, or t
  misc_feature (522)..(522): n is a, c, g, or t
  misc_feature (529)..(530): n is a, c, g, or t
  misc_feature (532)..(532): n is a, c, g, or t
  misc_feature (534)..(534): n is a, c, g, or t
  misc_feature (541)..(541): n is a, c, g, or t
  misc_feature (544)..(544): n is a, c, g, or t
  misc_feature (554)..(554): n is a, c, g, or t
  misc_feature (567)..(567): n is a, c, g, or t
  misc_feature (578)..(578): n is a, c, g, or t
  misc_feature (580)..(580): n is a, c, g, or t
  misc_feature (587)..(588): n is a, c, g, or t
  misc_feature (609)..(609): n is a, c, g, or t
  misc_feature (617)..(617): n is a, c, g, or t
  misc_feature (623)..(623): n is a, c, g, or t
  misc_feature (632)..(632): n is a, c, g, or t
  misc_feature (640)..(640): n is a, c, g, or t
  misc_feature (642)..(642): n is a, c, g, or t
  misc_feature (658)..(658): n is a, c, g, or t
  misc_feature (664)..(664): n is a, c, g, or t
  misc_feature (666)..(667): n is a, c, g, or t
  misc_feature (671)..(672): n is a, c, g, or t
  misc_feature (684)..(684): n is a, c, g, or t
  misc_feature (686)..(687): n is a, c, g, or t
  misc_feature (690)..(691): n is a, c, g, or t
  misc_feature (698)..(699): n is a, c, g, or t
  misc_feature (726)..(727): n is a, c, g, or t
  misc_feature (740)..(740): n is a, c, g, or t
  misc_feature (744)..(744): n is a, c, g, or t
  misc_feature (753)..(753): n is a, c, g, or t
  misc_feature (755)..(755): n is a, c, g, or t
  misc_feature (761)..(761): n is a, c, g, or t
  misc_feature (766)..(768): n is a, c, g, or t
  misc_feature (771)..(772): n is a, c, g, or t
  misc_feature (782)..(782): n is a, c, g, or t
  misc_feature (785)..(785): n is a, c, g, or t
  misc_feature (788)..(788): n is a, c, g, or t
  misc_feature (793)..(793): n is a, c, g, or t
  misc_feature (800)..(800): n is a, c, g, or t
  misc_feature (802)..(803): n is a, c, g, or t
  misc_feature (805)..(805): n is a, c, g, or t
  misc_feature (809)..(809): n is a, c, g, or t
  misc_feature (826)..(826): n is a, c, g, or t
  misc_feature (832)..(832): n is a, c, g, or t
  misc_feature (841)..(841): n is a, c, g, or t
  misc_feature (846)..(846): n is a, c, g, or t
  misc_feature (853)..(853): n is a, c, g, or t
  misc_feature (858)..(858): n is a, c, g, or t
  misc_feature (866)..(866): n is a, c, g, or t
  misc_feature (869)..(869): n is a, c, g, or t
  misc_feature (871)..(871): n is a, c, g, or t
  misc_feature (877)..(879): n is a, c, g, or t
  misc_feature (881)..(881): n is a, c, g, or t
  misc_feature (888)..(888): n is a, c, g, or t
  misc_feature (891)..(891): n is a, c, g, or t
  misc_feature (898)..(901): n is a, c, g, or t
  misc_feature (904)..(904): n is a, c, g, or t
  misc_feature (915)..(915): n is a, c, g, or t
  misc_feature (920)..(920): n is a, c, g, or t
  misc_feature (927)..(927): n is a, c, g, or t
  misc_feature (932)..(932): n is a, c, g, or t
  misc_feature (934)..(934): n is a, c, g, or t
  misc_feature (938)..(938): n is a, c, g, or t
  misc_feature (940)..(940): n is a, c, g, or t
  misc_feature (953)..(954): n is a, c, g, or t
  misc_feature (956)..(958): n is a, c, g, or t
  misc_feature (963)..(964): n is a, c, g, or t
  misc_feature (972)..(973): n is a, c, g, or t
  misc_feature (982)..(982): n is a, c, g, or t
  misc_feature (996)..(996): n is a, c, g, or t
  misc_feature (998)..(998): n is a, c, g, or t
  misc_feature (1001)..(1001): n is a, c, g, or t
  misc_feature (1003)..(1006): n is a, c, g, or t
  misc_feature (1009)..(1009): n is a, c, g, or t
  misc_feature (1017)..(1017): n is a, c, g, or t
  misc_feature (1020)..(1022): n is a, c, g, or t
  misc_feature (1033)..(1033): n is a, c, g, or t
  misc_feature (1046)..(1046): n is a, c, g, or t
  misc_feature (1048)..(1048): n is a, c, g, or t
  misc_feature (1052)..(1052): n is a, c, g, or t
  misc_feature (1059)..(1059): n is a, c, g, or t
  misc_feature (1069)..(1070): n is a, c, g, or t
  misc_feature (1073)..(1075): n is a, c, g, or t
  misc_feature (1081)..(1081): n is a, c, g, or t
  misc_feature (1085)..(1085): n is a, c, g, or t
  misc_feature (1091)..(1092): n is a, c, g, or t
  misc_feature (1095)..(1096): n is a, c, g, or t
  misc_feature (1103)..(1103): n is a, c, g, or t
  misc_feature (1105)..(1105): n is a, c, g, or t
  misc_feature (1114)..(1116): n is a, c, g, or t
  misc_feature (1120)..(1120): n is a, c, g, or t
  misc_feature (1129)..(1130): n is a, c, g, or t
  misc_feature (1140)..(1140): n is a, c, g, or t
  misc_feature (1149)..(1149): n is a, c, g, or t
  misc_feature (1157)..(1158): n is a, c, g, or t
  misc_feature (1166)..(1166): n is a, c, g, or t
  misc_feature (1175)..(1177): n is a, c, g, or t
  misc_feature (1181)..(1181): n is a, c, g, or t
  misc_feature (1186)..(1189): n is a, c, g, or t
  misc_feature (1201)..(1201): n is a, c, g, or t
  misc_feature (1220)..(1220): n is a, c, g, or t
  misc_feature (1225)..(1226): n is a, c, g, or t
  misc_feature (1233)..(1234): n is a, c, g, or t
  misc_feature (1237)..(1237): n is a, c, g, or t
  misc_feature (1241)..(1241): n is a, c, g, or t
  misc_feature (1243)..(1243): n is a, c, g, or t
  misc_feature (1245)..(1248): n is a, c, g, or t
  misc_feature (1251)..(1253): n is a, c, g, or t
  misc_feature (1261)..(1261): n is a, c, g, or t
  misc_feature (1266)..(1266): n is a, c, g, or t
  misc_feature (1270)..(1270): n is a, c, g, or t
  misc_feature (1279)..(1279): n is a, c, g, or t
  misc_feature (1287)..(1288): n is a, c, g, or t
  misc_feature (1290)..(1290): n is a, c, g, or t
  misc_feature (1292)..(1292): n is a, c, g, or t
  misc_feature (1294)..(1295): n is a, c, g, or t
  misc_feature (1300)..(1300): n is a, c, g, or t
  misc_feature (1302)..(1302): n is a, c, g, or t
  misc_feature (1322)..(1323): n is a, c, g, or t
  misc_feature (1329)..(1330): n is a, c, g, or t
  misc_feature (1332)..(1333): n is a, c, g, or t
  misc_feature (1336)..(1336): n is a, c, g, or t
  misc_feature (1339)..(1339): n is a, c, g, or t
  misc_feature (1343)..(1343): n is a, c, g, or t
  misc_feature (1352)..(1352): n is a, c, g, or t
  misc_feature (1354)..(1354): n is a, c, g, or t
  misc_feature (1366)..(1367): n is a, c, g, or t
  misc_feature (1373)..(1374): n is a, c, g, or t
  misc_feature (1378)..(1378): n is a, c, g, or t
  misc_feature (1380)..(1380): n is a, c, g, or t
  misc_feature (1383)..(1383): n is a, c, g, or t
  misc_feature (1387)..(1387): n is a, c, g, or t
  misc_feature (1389)..(1389): n is a, c, g, or t
  misc_feature (1396)..(1396): n is a, c, g, or t
  misc_feature (1398)..(1398): n is a, c, g, or t
  misc_feature (1404)..(1404): n is a, c, g, or t
  misc_feature (1408)..(1408): n is a, c, g, or t
  misc_feature (1423)..(1423): n is a, c, g, or t
  misc_feature (1437)..(1437): n is a, c, g, or t
  misc_feature (1440)..(1440): n is a, c, g, or t
  misc_feature (1462)..(1462): n is a, c, g, or t
  misc_feature (1467)..(1467): n is a, c, g, or t
  misc_feature (1477)..(1477): n is a, c, g, or t
tagagaaaattactatgagaggatcgcatcaccactcaccatcacggatcctatttaggtgacactatagaatcgtcgacccacgcgtccggccgctgccaccgcaccccgccatggagcggccgtcgctgcgcgccctgctcctcggcgccgctgggctgctgctcctgctcctgcccctctcctcttcctcctcttcggacacctgcggnccctgcgagccggcntcntgcccgcccctgcccccgctgggctgcctgctgggcgagacccgcgacgcgtgcggttgctgccctatgtgcgcccgcggcgagggcgagccgtgcgagggtggcggcgccggcaggnggtactgcgcgccgggcatgnagtgcgtgaagagccgcaagatgnggaagggtaaagccngggcagcanccggcggtccgggtgtaancggcgtgtgcgtgtgcaanagccgctaccncggtgtgnganaacnacggcaccacctacncgancggctgtncaatntgcgcnccnccagccnnangnacgaganccncgggtaaaangccatcacccagntcagtaagggnanctgcgannaaggtccttccatagtgactncccccaangaaatntgaaatgtnaatggtgncnaagtgtacttgagctntaaatntnnttcnnaatcccgacacntnntcnncattttnnaacaaaggttaaaaagggatcacttanntagatttcaaaangaanaaaaattcntnccctgntagannnaannaaaccttggncanatnataanccaggantnngncccnataaaaagcatgaaaanaaactnggtctgggntgctngttaatnttccntcaaaaanaangnaaaatnnntnaaaaaanatngaagttnnnntgnaatacaatttnaaaangaaaaantcttnanacantnaataaaaaatatnntnnntttgnngcccttcnnttaaatacnagataaaataaagntnaangnnnnctnacttatanacnnnccagaaaaatnataaatattgatngnaaanaaatatnatcctgggannaannntatagncganttcttnnctnnaaaaaantnccttttatnnnaccnccactaaannatttaagatnaatttaaanttttttannacaaacanaaataaatnnnaaantcaannnnaaaaaaattatnaaaatttaatttatttatnttaannaatatannacntctnanannnnatnnntgctttcncctanaaanacataaaanatcagaannantncnntaatncntatattataattaaaataanncaaccnncnnctnctnaatntataatatnanaattcgataagnngcattnnaaananatnaacnanaaacatnantaattnatanacatcctaagatatnagagaaaaaatctnatnataatttataattgtatcatanatacnaataatacang

SEQ ID NO: 178 - DNA, 1239 bp, Homo Sapiens
  misc_feature (899)..(899): n is a, c, g, or t
  misc_feature (926)..(926): n is a, c, g, or t
  misc_feature (929)..(929): n is a, c, g, or t
  misc_feature (946)..(946): n is a, c, g, or t
  misc_feature (958)..(958): n is a, c, g, or t
  misc_feature (991)..(991): n is a, c, g, or t
  misc_feature (996)..(996): n is a, c, g, or t
  misc_feature (1010)..(1010): n is a, c, g, or t
  misc_feature (1032)..(1032): n is a, c, g, or t
  misc_feature (1042)..(1042): n is a, c, g, or t
  misc_feature (1057)..(1057): n is a, c, g, or t
  misc_feature (1083)..(1083): n is a, c, g, or t
  misc_feature (1096)..(1096): n is a, c, g, or t
  misc_feature (1098)..(1098): n is a, c, g, or t
  misc_feature (1102)..(1102): n is a, c, g, or t
  misc_feature (1112)..(1112): n is a, c, g, or t
  misc_feature (1128)..(1128): n is a, c, g, or t
  misc_feature (1132)..(1132): n is a, c, g, or t
  misc_feature (1145)..(1145): n is a, c, g, or t
  misc_feature (1153)..(1154): n is a, c, g, or t
  misc_feature (1156)..(1156): n is a, c, g, or t
  misc_feature (1162)..(1162): n is a, c, g, or t
  misc_feature (1165)..(1165): n is a, c, g, or t
  misc_feature (1170)..(1170): n is a, c, g, or t
  misc_feature (1172)..(1172): n is a, c, g, or t
  misc_feature (1176)..(1176): n is a, c, g, or t
  misc_feature (1178)..(1180): n is a, c, g, or t
  misc_feature (1187)..(1187): n is a, c, g, or t
  misc_feature (1192)..(1192): n is a, c, g, or t
  misc_feature (1203)..(1203): n is a, c, g, or t
  misc_feature (1207)..(1207): n is a, c, g, or t
  misc_feature (1213)..(1214): n is a, c, g, or t
  misc_feature (1219)..(1219): n is a, c, g, or t
  misc_feature (1221)..(1222): n is a, c, g, or t
  misc_feature (1229)..(1229): n is a, c, g, or t
  misc_feature (1236)..(1236): n is a, c, g, or t
tagagaaattactatgagaggatcgcatcaccatcaccatcacggatcctatttaggtgacactatagaatcgtcgacccacgcgtccgtgatgaaggagttccggtttgagccatcctcacagatgatcgaggtgcaggaaggccagaacctgaagatcaccatcacggggtaccgaaccgcttacagttgctatggcacagtgtcttccttaaacggagagcccgaacaaggggttgccatggaagcggtgggccagaacgactgcagcatttacggagaagacaccgtgacagacgaagagggcaagttcagattacgtggattgctgccgggatgtgtgtaccacgttcagctcaaggcagaaggcaacgaccacattgagcgggcgctcccccaccatagggtgattgaggttgggaataatgacatcgatgatgtaaacatcatagttttccggcagattaatcaatttgatttaagtggaaatgtgatcacttcctctgaataccttcctacgttatgggtcaagctttacaaaagcgaaaacctcgacaatccaatccagacagtttcccttggccagtccctgttcttccatttccccccactgctcagagatggcgagaactatgttgtgcttctggactccacactccccagatcccagtatgactacatcttgcctcaagtttctttcaccgcagtgggctaccataaacacatcaccttgatttttaatcccacgaggaagctgcctgaacaggacatcgcacaaggatcctacattgccctgccattgacgctgctggttctgctggccggttacaaccatgacaagctcattcctttgctgctgcagttgacaagccggctacagggagtcggcgcgctcggcnaggcagcctctgacaatagcggcccanaanatgcaaagagacagccnagaaaccgaaanaaggcggacgtgaggagaaggggacagttgcantctcncttgggaaaggccncagccagggggtccgggccctnccccccccgngggaaaaagccaaangcatgggtcagctaacttcagcctgngctgctgggcccncncccntgtcccttgncctgggggatcctgcncccncccccccccccgnaaaccccnngngaaagnaanagaangncccncnnncccctgnggaanaaatttttttncganccaaannatttntnnttttttntcaaaanttt

SEQ ID NO: 179 - DNA, 256 bp, Homo Sapiens
caggcgtcggtgctcagcggtgttggaacttcgttgcttgcttgcctgtgcgcgcgtgcgcggacatggcctcaaacgattatacccaacaagcaacccaaagctatggggcctaccccacccagcccgggcagggctattcccagcagagcagtcagccctacggacagcagagttacagtggttatagccagtccacggacacttcaggctatggccagagcagctattcttcttatggccagagccagaacac

SEQ ID NO: 180 - DNA, 1200 bp, Homo Sapiens
  misc_feature (1)..(2): n is a, c, g, or t
  misc_feature (4)..(4): n is a, c, g, or t
  misc_feature (833)..(833): n is a, c, g, or t
  misc_feature (913)..(913): n is a, c, g, or t
  misc_feature (954)..(954): n is a, c, g, or t
  misc_feature (980)..(980): n is a, c, g, or t
  misc_feature (982)..(982): n is a, c, g, or t
  misc_feature (986)..(987): n is a, c, g, or t
  misc_feature (989)..(989): n is a, c, g, or t
  misc_feature (994)..(994): n is a, c, g, or t
  misc_feature (997)..(998): n is a, c, g, or t
  misc_feature (1006)..(1006): n is a, c, g, or t
  misc_feature (1010)..(1010): n is a, c, g, or t
  misc_feature (1021)..(1021): n is a, c, g, or t
  misc_feature (1023)..(1023): n is a, c, g, or t
  misc_feature (1034)..(1034): n is a, c, g, or t
  misc_feature (1039)..(1039): n is a, c, g, or t
  misc_feature (1042)..(1044): n is a, c, g, or t
  misc_feature (1048)..(1048): n is a, c, g, or t
  misc_feature (1054)..(1054): n is a, c, g, or t
  misc_feature (1058)..(1058): n is a, c, g, or t
  misc_feature (1062)..(1062): n is a, c, g, or t
  misc_feature (1065)..(1065): n is a, c, g, or t
  misc_feature (1068)..(1068): n is a, c, g, or t
  misc_feature (1072)..(1072): n is a, c, g, or t
  misc_feature (1077)..(1077): n is a, c, g, or t
  misc_feature (1082)..(1082): n is a, c, g, or t
  misc_feature (1085)..(1085): n is a, c, g, or t
  misc_feature (1089)..(1089): n is a, c, g, or t
  misc_feature (1093)..(1093): n is a, c, g, or t
  misc_feature (1098)..(1098): n is a, c, g, or t
  misc_feature (1106)..(1106): n is a, c, g, or t
  misc_feature (1108)..(1109): n is a, c, g, or t
  misc_feature (1115)..(1115): n is a, c, g, or t
  misc_feature (1121)..(1121): n is a, c, g, or t
  misc_feature (1125)..(1125): n is a, c, g, or t
  misc_feature (1129)..(1129): n is a, c, g, or t
  misc_feature (1134)..(1134): n is a, c, g, or t
  misc_feature (1138)..(1138): n is a, c, g, or t
  misc_feature (1144)..(1144): n is a, c, g, or t
  misc_feature (1147)..(1147): n is a, c, g, or t
  misc_feature (1159)..(1161): n is a, c, g, or t
  misc_feature (1163)..(1163): n is a, c, g, or t
  misc_feature (1170)..(1170): n is a, c, g, or t
  misc_feature (1195)..(1195): n is a, c, g, or t
  misc_feature (1200)..(1200): n is a, c, g, or t
nnantagagaaattactatgagaggatcgcatcaccatcaccatcacggatcctatttaggtgacactatagaatcgtcgacccacgcgtccgcccacgcgtccgctttggaaaagaaaaccattgagtgggctgaagagattaagaaaatcgaagaagccgagcgggaagcagagtgcaaaattgcggaagcagaagctaaagtgaattctaagagtggcccagagggcgatagcaaaatgagcttctccaagactcacagtacagccacaatgccacctcctattaaccccatcctcgccagcttgcagcacaacagcatcctcacaccaactcgggtcagcagtagtgccacgaaacagaaagttctcagcccacctcacataaaggcggatttcaatcttgctgactttgagtgtgaagaagacccatttgataatctggagttaaaaactattgatgagaaggaagagctgagaaatattctggtaggaaccactggacccattatggctcagttattggacaataacttgcccaggggaggctctgggtctgtgttacaggatgaggaggtcctggcatccttggaacgggcaaccctagatttcaagcctcttcataaacccaatggctttataaccttaccacagttgggcaactgtgaaaagatgtcactgtcttccaaagtgtccctcccccctatacctgcagtaagcaatatcaaatccctgtctttccccaaacttgactctgatgacagcaatcagaagacagccaagctggcgagcactttccatagcacatcctgcctccgcaatggcacgttccanaattccctaaagccttccacccaaagcagtgccagtgagctcaatgggcatcacactcttgggctttcagccttgaactnggacagtggcccagagatgccagccctgacattcctcccanaggccttccctctctgttttgtctgngngccnnanaggantcnncccctccnaaanactgggtcccncnggtcccccccncctanttnnncagngtcccnagtngccnacntgncccngcctntcccnagncctntttngaatngcaaatgntnncccccnccaggnggcnatgnggggnaaangggggncanattgggccaccnnnanaaggggntcccccaaccttgaaaaaaaaaggnaaaan

SEQ ID NO: 181 - DNA, 1340 bp, Homo Sapiens
  misc_feature (1)..(1): n is a, c, g, or t
  misc_feature (4)..(10): n is a, c, g, or t
  misc_feature (15)..(15): n is a, c, g, or t
  misc_feature (577)..(577): n is a, c, g, or t
  misc_feature (629)..(629): n is a, c, g, or t
  misc_feature (654)..(654): n is a, c, g, or t
  misc_feature (709)..(709): n is a, c, g, or t
  misc_feature (720)..(720): n is a, c, g, or t
  misc_feature (748)..(748): n is a, c, g, or t
  misc_feature (792)..(792): n is a, c, g, or t
  misc_feature (797)..(797): n is a, c, g, or t
  misc_feature (818)..(818): n is a, c, g, or t
  misc_feature (822)..(822): n is a, c, g, or t
  misc_feature (825)..(826): n is a, c, g, or t
  misc_feature (831)..(831): n is a, c, g, or t
  misc_feature (836)..(836): n is a, c, g, or t
  misc_feature (842)..(842): n is a, c, g, or t
  misc_feature (845)..(845): n is a, c, g, or t
  misc_feature (863)..(864): n is a, c, g, or t
  misc_feature (868)..(868): n is a, c, g, or t
  misc_feature (870)..(870): n is a, c, g, or t
  misc_feature (872)..(872): n is a, c, g, or t
  misc_feature (876)..(877): n is a, c, g, or t
  misc_feature (879)..(879): n is a, c, g, or t
  misc_feature (883)..(883): n is a, c, g, or t
  misc_feature (891)..(891): n is a, c, g, or t
  misc_feature (895)..(895): n is a, c, g, or t
  misc_feature (899)..(899): n is a, c, g, or t
  misc_feature (913)..(913): n is a, c, g, or t
  misc_feature (916)..(916): n is a, c, g, or t
  misc_feature (918)..(918): n is a, c, g, or t
  misc_feature (926)..(926): n is a, c, g, or t
  misc_feature (931)..(931): n is a, c, g, or t
  misc_feature (935)..(935): n is a, c, g, or t
  misc_feature (937)..(938): n is a, c, g, or t
  misc_feature (940)..(940): n is a, c, g, or t
  misc_feature (942)..(942): n is a, c, g, or t
  misc_feature (948)..(948): n is a, c, g, or t
  misc_feature (958)..(958): n is a, c, g, or t
  misc_feature (977)..(977): n is a, c, g, or t
  misc_feature (981)..(981): n is a, c, g, or t
  misc_feature (983)..(983): n is a, c, g, or t
  misc_feature (986)..(986): n is a, c, g, or t
  misc_feature (992)..(992): n is a, c, g, or t
  misc_feature (996)..(996): n is a, c, g, or t
  misc_feature (998)..(998): n is a, c, g, or t
  misc_feature (1008)..(1008): n is a, c, g, or t
  misc_feature (1013)..(1013): n is a, c, g, or t
  misc_feature (1016)..(1016): n is a, c, g, or t
  misc_feature (1018)..(1018): n is a, c, g, or t
  misc_feature (1027)..(1027): n is a, c, g, or t
  misc_feature (1032)..(1034): n is a, c, g, or t
  misc_feature (1041)..(1041): n is a, c, g, or t
  misc_feature (1044)..(1044): n is a, c, g, or t
  misc_feature (1049)..(1049): n is a, c, g, or t
  misc_feature (1052)..(1052): n is a, c, g, or t
  misc_feature (1056)..(1056): n is a, c, g, or t
  misc_feature (1059)..(1059): n is a, c, g, or t
  misc_feature (1064)..(1064): n is a, c, g, or t
  misc_feature (1069)..(1069): n is a, c, g, or t
  misc_feature (1072)..(1072): n is a, c, g, or t
  misc_feature (1077)..(1077): n is a, c, g, or t
  misc_feature (1083)..(1083): n is a, c, g, or t
  misc_feature (1086)..(1086): n is a, c, g, or t
  misc_feature (1106)..(1106): n is a, c, g, or t
  misc_feature (1115)..(1118): n is a, c, g, or t
  misc_feature (1122)..(1122): n is a, c, g, or t
  misc_feature (1126)..(1126): n is a, c, g, or t
  misc_feature (1128)..(1130): n is a, c, g, or t
  misc_feature (1135)..(1135): n is a, c, g, or t
  misc_feature (1138)..(1151): n is a, c, g, or t
  misc_feature (1153)..(1155): n is a, c, g, or t
  misc_feature (1157)..(1160): n is a, c, g, or t
  misc_feature (1165)..(1167): n is a, c, g, or t
  misc_feature (1170)..(1175): n is a, c, g, or t
  misc_feature (1179)..(1183): n is a, c, g, or t
  misc_feature (1185)..(1186): n is a, c, g, or t
  misc_feature (1188)..(1188): n is a, c, g, or t
  misc_feature (1191)..(1193): n is a, c, g, or t
  misc_feature (1195)..(1195): n is a, c, g, or t
  misc_feature (1197)..(1198): n is a, c, g, or t
  misc_feature (1200)..(1202): n is a, c, g, or t
  misc_feature (1204)..(1205): n is a, c, g, or t
  misc_feature (1208)..(1209): n is a, c, g, or t
  misc_feature (1211)..(1211): n is a, c, g, or t
  misc_feature (1215)..(1215): n is a, c, g, or t
  misc_feature (1219)..(1220): n is a, c, g, or t
  misc_feature (1222)..(1225): n is a, c, g, or t
  misc_feature (1228)..(1230): n is a, c, g, or t
  misc_feature (1232)..(1233): n is a, c, g, or t
  misc_feature (1235)..(1235): n is a, c, g, or t
  misc_feature (1241)..(1243): n is a, c, g, or t
  misc_feature (1246)..(1246): n is a, c, g, or t
  misc_feature (1248)..(1248): n is a, c, g, or t
  misc_feature (1253)..(1253): n is a, c, g, or t
  misc_feature (1258)..(1259): n is a, c, g, or t
  misc_feature (1262)..(1263): n is a, c, g, or t
  misc_feature (1267)..(1267): n is a, c, g, or t
  misc_feature (1271)..(1271): n is a, c, g, or t
  misc_feature (1278)..(1278): n is a, c, g, or t
  misc_feature (1280)..(1280): n is a, c, g, or t
  misc_feature (1284)..(1284): n is a, c, g, or t
  misc_feature (1288)..(1292): n is a, c, g, or t
  misc_feature (1298)..(1298): n is a, c, g, or t
  misc_feature (1301)..(1301): n is a, c, g, or t
  misc_feature (1304)..(1307): n is a, c, g, or t
  misc_feature (1310)..(1311): n is a, c, g, or t
  misc_feature (1315)..(1318): n is a, c, g, or t
  misc_feature (1320)..(1322): n is a, c, g, or t
  misc_feature (1332)..(1334): n is a, c, g, or t
ncannnnnnncaatnagagaaaattactatgagaggatcgcatcaccatcaccatcacggatcctatttaggtgacactatagaatcgtcgacccacgcgtccgcgctgtgcgcggcggacgtcggaggcagcggggagcggagcggggccgccggggcctctccagggccgcagcggcagcagttgggccccccgccccggccggcggaccgaagaacgcaggaagggggccggggggacccgcccccggccggccgcagccatgaactccaacgtggagaacctacccccgcacatcatccgcctggtgtacaaggaggtgacgacactgaccgcagacccacccgatggcatcaaggtctttcccaacgaggaggacctcaccgacctccaggtcaccatcgagggccctgaggggaccccatatgctggaggtctgttccgcatgaaactcctgctggggaaggacttccctgcctccccacccaagggctacttcctgaccaagatcttccacccgaacgtgggcgccaatggcgagatctgcgtcaacgtgctcaagagggactggacggntgagctgggcatccgacacgtactgctgaccatcaagtgcctgctgatccancctaaccccgagtctgcactcaacnaggaggcgggccgcctgctcttggagaactacgaggagtatgcagctcgggcccntctgctcacanatatccacgggggcgccggcggtcccancggcagggccgaagccggtcgggccctggtcagtggcactgaancttcntccaccgaaccctggggcccnaagnggnnccggnaaggngcttanggntcccaatggccaaaaaannatgntngntaanncnctantaaaaaantggntggncaaaaaaaaatatnggnanaaaaaacngggcncttncnncngnttatantgggtttttntttctttcttttcaacggnaaancnaanttttcnttgntncccttccttnacaanttntnttctttaanattannnaatttantgntgggnatngggnaanataanggggnaanttggnaaactnaanttttttttttttaaataaanttggaaaannnnaaanatantnnntttantannnnnnnnnnnnnntnnnannnnttatnnnaannnnnnaaannnnnannanaannnanannannnanntcnntnctantaannannnntannnanntnaataannnaantnttaantcttnnaannaaanttanaaaaacntnaaanctcnnnnnattttntanaannnnttnntttnnnngnnntttttttttnnnaaaaaa

SEQ ID NO: 182 - DNA, 1439 bp, Homo Sapiens
  misc_feature (651)..(651): n is a, c, g, or t
  misc_feature (660)..(660): n is a, c, g, or t
  misc_feature (666)..(666): n is a, c, g, or t
  misc_feature (675)..(676): n is a, c, g, or t
  misc_feature (679)..(679): n is a, c, g, or t
  misc_feature (682)..(683): n is a, c, g, or t
  misc_feature (685)..(687): n is a, c, g, or t
  misc_feature (689)..(689): n is a, c, g, or t
  misc_feature (691)..(695): n is a, c, g, or t
  misc_feature (697)..(698): n is a, c, g, or t
  misc_feature (700)..(707): n is a, c, g, or t
  misc_feature (709)..(709): n is a, c, g, or t
  misc_feature (711)..(715): n is a, c, g, or t
  misc_feature (718)..(720): n is a, c, g, or t
  misc_feature (722)..(722): n is a, c, g, or t
  misc_feature (724)..(737): n is a, c, g, or t
  misc_feature (739)..(739): n is a, c, g, or t
  misc_feature (741)..(744): n is a, c, g, or t
  misc_feature (746)..(746): n is a, c, g, or t
  misc_feature (748)..(750): n is a, c, g, or t
  misc_feature (757)..(757): n is a, c, g, or t
  misc_feature (759)..(759): n is a, c, g, or t
  misc_feature (769)..(769): n is a, c, g, or t
  misc_feature (775)..(775): n is a, c, g, or t
  misc_feature (779)..(779): n is a, c, g, or t
  misc_feature (786)..(786): n is a, c, g, or t
  misc_feature (795)..(796): n is a, c, g, or t
  misc_feature (800)..(801): n is a, c, g, or t
  misc_feature (806)..(808): n is a, c, g, or t
  misc_feature (810)..(811): n is a, c, g, or t
  misc_feature (815)..(815): n is a, c, g, or t
  misc_feature (822)..(822): n is a, c, g, or t
  misc_feature (825)..(826): n is a, c, g, or t
  misc_feature (830)..(830): n is a, c, g, or t
  misc_feature (832)..(832): n is a, c, g, or t
  misc_feature (835)..(835): n is a, c, g, or t
  misc_feature (838)..(838): n is a, c, g, or t
  misc_feature (841)..(841): n is a, c, g, or t
  misc_feature (843)..(843): n is a, c, g, or t
  misc_feature (860)..(861): n is a, c, g, or t
  misc_feature (869)..(869): n is a, c, g, or t
  misc_feature (871)..(871): n is a, c, g, or t
  misc_feature (874)..(874): n is a, c, g, or t
  misc_feature (880)..(880): n is a, c, g, or t
  misc_feature (882)..(882): n is a, c, g, or t
  misc_feature (885)..(886): n is a, c, g, or t
  misc_feature (894)..(894): n is a, c, g, or t
  misc_feature (909)..(912): n is a, c, g, or t
  misc_feature (914)..(914): n is a, c, g, or t
  misc_feature (917)..(917): n is a, c, g, or t
  misc_feature (920)..(920): n is a, c, g, or t
  misc_feature (923)..(923): n is a, c, g, or t
  misc_feature (930)..(930): n is a, c, g, or t
  misc_feature (932)..(932): n is a, c, g, or t
  misc_feature (936)..(936): n is a, c, g, or t
  misc_feature (938)..(938): n is a, c, g, or t
  misc_feature (940)..(940): n is a, c, g, or t
  misc_feature (947)..(947): n is a, c, g, or t
  misc_feature (954)..(954): n is a, c, g, or t
  misc_feature (968)..(969): n is a, c, g, or t
  misc_feature (987)..(987): n is a, c, g, or t
  misc_feature (993)..(996): n is a, c, g, or t
  misc_feature (1009)..(1010): n is a, c, g, or t
  misc_feature (1024)..(1024): n is a, c, g, or t
  misc_feature (1029)..(1029): n is a, c, g, or t
  misc_feature (1033)..(1033): n is a, c, g, or t
  misc_feature (1035)..(1036): n is a, c, g, or t
  misc_feature (1039)..(1039): n is a, c, g, or t
  misc_feature (1051)..(1051): n is a, c, g, or t
  misc_feature (1056)..(1056): n is a, c, g, or t
  misc_feature (1065)..(1066): n is a, c, g, or t
  misc_feature (1068)..(1069): n is a, c, g, or t
  misc_feature (1072)..(1072): n is a, c, g, or t
  misc_feature (1083)..(1085): n is a, c, g, or t
  misc_feature (1096)..(1096): n is a, c, g, or t
  misc_feature (1101)..(1101): n is a, c, g, or t
  misc_feature (1103)..(1105): n is a, c, g, or t
  misc_feature (1120)..(1120): n is a, c, g, or t
  misc_feature (1127)..(1128): n is a, c, g, or t
  misc_feature (1133)..(1133): n is a, c, g, or t
  misc_feature (1140)..(1140): n is a, c, g, or t
  misc_feature (1147)..(1147): n is a, c, g, or t
  misc_feature (1156)..(1156): n is a, c, g, or t
  misc_feature (1161)..(1161): n is a, c, g, or t
  misc_feature (1163)..(1165): n is a, c, g, or t
  misc_feature (1169)..(1169): n is a, c, g, or t
  misc_feature (1175)..(1175): n is a, c, g, or t
  misc_feature (1178)..(1178): n is a, c, g, or t
  misc_feature (1180)..(1181): n is a, c, g, or t
  misc_feature (1183)..(1183): n is a, c, g, or t
  misc_feature (1192)..(1192): n is a, c, g, or t
  misc_feature (1199)..(1199): n is a, c, g, or t
  misc_feature (1203)..(1203): n is a, c, g, or t
  misc_feature (1209)..(1211): n is a, c, g, or t
  misc_feature (1218)..(1218): n is a, c, g, or t
  misc_feature (1221)..(1221): n is a, c, g, or t
  misc_feature (1223)..(1223): n is a, c, g, or t
  misc_feature (1231)..(1233): n is a, c, g, or t
  misc_feature (1235)..(1235): n is a, c, g, or t
  misc_feature (1240)..(1241): n is a, c, g, or t
  misc_feature (1245)..(1245): n is a, c, g, or t
  misc_feature (1252)..(1252): n is a, c, g, or t
  misc_feature (1257)..(1258): n is a, c, g, or t
  misc_feature (1273)..(1274): n is a, c, g, or t
  misc_feature (1276)..(1278): n is a, c, g, or t
  misc_feature (1281)..(1281): n is a, c, g, or t
  misc_feature (1297)..(1298): n is a, c, g, or t
  misc_feature (1303)..(1303): n is a, c, g, or t
  misc_feature (1307)..(1307): n is a, c, g, or t
  misc_feature (1313)..(1313): n is a, c, g, or t
  misc_feature (1315)..(1315): n is a, c, g, or t
  misc_feature (1317)..(1317): n is a, c, g, or t
  misc_feature (1327)..(1327): n is a, c, g, or t
  misc_feature (1336)..(1336): n is a, c, g, or t
  misc_feature (1342)..(1342): n is a, c, g, or t
  misc_feature (1351)..(1351): n is a, c, g, or t
  misc_feature (1353)..(1354): n is a, c, g, or t
  misc_feature (1356)..(1357): n is a, c, g, or t
  misc_feature (1360)..(1360): n is a, c, g, or t
  misc_feature (1365)..(1368): n is a, c, g, or t
  misc_feature (1371)..(1371): n is a, c, g, or t
  misc_feature (1375)..(1376): n is a, c, g, or t
  misc_feature (1378)..(1380): n is a, c, g, or t
  misc_feature (1386)..(1386): n is a, c, g, or t
  misc_feature (1388)..(1388): n is a, c, g, or t
  misc_feature (1393)..(1394): n is a, c, g, or t
  misc_feature (1397)..(1397): n is a, c, g, or t
  misc_feature (1399)..(1400): n is a, c, g, or t
  misc_feature (1403)..(1403): n is a, c, g, or t
  misc_feature (1405)..(1405): n is a, c, g, or t
  misc_feature (1407)..(1407): n is a, c, g, or t
  misc_feature (1412)..(1415): n is a, c, g, or t
  misc_feature (1417)..(1422): n is a, c, g, or t
  misc_feature (1425)..(1425): n is a, c, g, or t
  misc_feature (1427)..(1427): n is a, c, g, or t
  misc_feature (1429)..(1431): n is a, c, g, or t
  misc_feature (1434)..(1434): n is a, c, g, or t
  misc_feature (1438)..(1438): n is a, c, g, or t
tagagagattactatgagaggatcgcatcaccatcaccatcacggatcctatttaggtgacactatagaatcgtcgacccacgcgatccgacatcacggagctgaatctgccgcagctagaaatgctcaagaaccagctggaccaggaagtggagttcttgtccacgtccattgctcagctcaaagtggtacagaccaagtatgtggaagccaaggactgtctgaacgtgctgaacaagagcaacgaggggaaagaattactcgtcccactgacgagttctatgtatgtccctgggaagctgcatgatgtggaacacgtgctcatcgatgtgggaactgggtactatgtagagaagacagctgaggatgccaaggacttcttcaagaggaagatagattttctaaccaagcagatggagaaaatccaaccagctcttcaggagaagcacgccatgaaacaggccgtcatggaaatgatgagtcagaagattcagcagctcacagccctgggggcagctcaggctactgctaaggcctgagagtttttgcagaaatggggcagagggacaccctttgggcgtggcttcctggtgatgggaagggtcttgtgttttaatgccaataaatgtgccagctgggcagaatgttaanaaaaaaaanaaaaanaaaaaaaannaanatnnannnanannnnnannannnnnnnnanannnnnaannnanannnnnnnnnnnnnnanannnnanannnaaagggngncccccccctnaagggngccnaattaanttaaattanntaannttggnnncnngttnaaaaaanccnnaaangnccnccnaancncccttttggattttttnnaaaacccncnggntgcccncnggnntttttttnttggggaaaatcccnnnntnacnttnggnaaatttntngggncntnaggaaanctaaaantggaaaaaaaaaanncctgggatttcccccccntttaannnnccccagggctccnntaaaaaaatttttnggggntttncnnccnttgccttcgggnccccnaaaacccanncnnttnccttggaaatnnncggcctttttnaaaancnnnaaaaaaaaaaacccnatttttnncggcnttttttnctttttnccccctgangaagncnnncccnaatttncangnnanaaaaaacgnaactggnaaangaaaannnccccctnttncnccttttcnnnanaaaannaaantttttcncttcnnaaaaaacccaaaatnngnnnttntcacaatattccaaannggggngatnagaaantncnttttcccagnttttaaatnttttcnccccccccngnnannccnttttnnnngcnaaanntnnncccttncnggaannaangnnagngntnccggnnnntnnnnnntgntncnnnaanaaana

SEQ ID NO: 183 - DNA, 256 bp, Homo Sapiens
ttccctgcagccctcccacgggaatgacaatggataaaagtgagctggtacagaaagccaaactcgctgagcaggctgagcgctatgatgatatggctgcagccatgaaggcagtcacagaacaggggcatgaactctccaacgaagagagaaatctgctctctgttgcctacaagaatgtggtaggcgcccgccgctcttcctggcgtgtcatctccagcattgagcagaaaacagagaggaatgagaagaagca

SEQ ID NO: 184 - DNA, 256 bp, Homo Sapiens
atccccagaagtttgcactttttaagcggatacacaaggacggacaagtgctcttccagaaactctccattgctgaccgccccctctacctgcgcctgcttgctgggcctgacacggaggtcctcagctttgtgctaaaggagaatgaaactggagaggtagagtgggatgccttctccatccctgaacttcagaacttcctaacaatcctggaaaaagaggagcaggacaaaatccaacaagtgcaaaagaagta

SEQ ID NO: 185 - DNA, 1408 bp, Homo Sapiens
  misc_feature (631)..(631): n is a, c, g, or t
  misc_feature (633)..(637): n is a, c, g, or t
  misc_feature (640)..(641): n is a, c, g, or t
  misc_feature (643)..(648): n is a, c, g, or t
  misc_feature (691)..(691): n is a, c, g, or t
  misc_feature (696)..(696): n is a, c, g, or t
  misc_feature (713)..(713): n is a, c, g, or t
  misc_feature (722)..(722): n is a, c, g, or t
  misc_feature (773)..(773): n is a, c, g, or t
  misc_feature (806)..(806): n is a, c, g, or t
  misc_feature (810)..(810): n is a, c, g, or t
  misc_feature (817)..(817): n is a, c, g, or t
  misc_feature (819)..(819): n is a, c, g, or t
  misc_feature (827)..(827): n is a, c, g, or t
  misc_feature (831)..(831): n is a, c, g, or t
  misc_feature (837)..(837): n is a, c, g, or t
  misc_feature (839)..(839): n is a, c, g, or t
  misc_feature (865)..(865): n is a, c, g, or t
  misc_feature (872)..(872): n is a, c, g, or t
  misc_feature (902)..(903): n is a, c, g, or t
  misc_feature (922)..(922): n is a, c, g, or t
  misc_feature (927)..(928): n is a, c, g, or t
  misc_feature (936)..(937): n is a, c, g, or t
  misc_feature (939)..(939): n is a, c, g, or t
  misc_feature (948)..(948): n is a, c, g, or t
  misc_feature (955)..(955): n is a, c, g, or t
  misc_feature (969)..(969): n is a, c, g, or t
  misc_feature (973)..(973): n is a, c, g, or t
  misc_feature (980)..(980): n is a, c, g, or t
  misc_feature (1000)..(1000): n is a, c, g, or t
  misc_feature (1005)..(1006): n is a, c, g, or t
  misc_feature (1040)..(1040): n is a, c, g, or t
  misc_feature (1046)..(1046): n is a, c, g, or t
  misc_feature (1058)..(1059): n is a, c, g, or t
  misc_feature (1069)..(1069): n is a, c, g, or t
  misc_feature (1072)..(1072): n is a, c, g, or t
  misc_feature (1078)..(1079): n is a, c, g, or t
  misc_feature (1081)..(1081): n is a, c, g, or t
  misc_feature (1083)..(1083): n is a, c, g, or t
  misc_feature (1087)..(1088): n is a, c, g, or t
  misc_feature (1090)..(1090): n is a, c, g, or t
  misc_feature (1095)..(1095): n is a, c, g, or t
  misc_feature (1098)..(1099): n is a, c, g, or t
  misc_feature (1102)..(1102): n is a, c, g, or t
  misc_feature (1105)..(1106): n is a, c, g, or t
  misc_feature (1113)..(1115): n is a, c, g, or t
  misc_feature (1129)..(1129): n is a, c, g, or t
  misc_feature (1141)..(1141): n is a, c, g, or t
  misc_feature (1144)..(1144): n is a, c, g, or t
  misc_feature (1149)..(1149): n is a, c, g, or t
  misc_feature (1158)..(1158): n is a, c, g, or t
  misc_feature (1161)..(1161): n is a, c, g, or t
  misc_feature (1168)..(1168): n is a, c, g, or t
  misc_feature (1170)..(1170): n is a, c, g, or t
  misc_feature (1178)..(1180): n is a, c, g, or t
  misc_feature (1191)..(1192): n is a, c, g, or t
  misc_feature (1199)..(1200): n is a, c, g, or t
  misc_feature (1202)..(1203): n is a, c, g, or t
  misc_feature (1210)..(1210): n is a, c, g, or t
  misc_feature (1222)..(1222): n is a, c, g, or t
  misc_feature (1225)..(1225): n is a, c, g, or t
  misc_feature (1232)..(1233): n is a, c, g, or t
  misc_feature (1235)..(1235): n is a, c, g, or t
  misc_feature (1248)..(1248): n is a, c, g, or t
  misc_feature (1252)..(1252): n is a, c, g, or t
  misc_feature (1262)..(1262): n is a, c, g, or t
  misc_feature (1266)..(1267): n is a, c, g, or t
  misc_feature (1283)..(1283): n is a, c, g, or t
  misc_feature (1290)..(1290): n is a, c, g, or t
  misc_feature (1296)..(1297): n is a, c, g, or t
  misc_feature (1318)..(1318): n is a, c, g, or t
  misc_feature (1320)..(1320): n is a, c, g, or t
  misc_feature (1327)..(1327): n is a, c, g, or t
  misc_feature (1339)..(1339): n is a, c, g, or t
  misc_feature (1342)..(1342): n is a, c, g, or t
  misc_feature (1344)..(1344): n is a, c, g, or t
  misc_feature (1347)..(1347): n is a, c, g, or t
  misc_feature (1352)..(1352): n is a, c, g, or t
  misc_feature (1354)..(1354): n is a, c, g, or t
  misc_feature (1358)..(1358): n is a, c, g, or t
  misc_feature (1367)..(1367): n is a, c, g, or t
  misc_feature (1370)..(1371): n is a, c, g, or t
  misc_feature (1375)..(1375): n is a, c, g, or t
  misc_feature (1377)..(1377): n is a, c, g, or t
  misc_feature (1380)..(1381): n is a, c, g, or t
  misc_feature (1383)..(1383): n is a, c, g, or t
  misc_feature (1385)..(1385): n is a, c, g, or t
  misc_feature (1387)..(1388): n is a, c, g, or t
  misc_feature (1390)..(1393): n is a, c, g, or t
  misc_feature (1396)..(1401): n is a, c, g, or t
  misc_feature (1408)..(1408): n is a, c, g, or t
atagagaaattactatgagaggatcgcatcaccatcaccatcacggatcctatttaggtgacactatagaatcgtcgacccacgcgtccggcggcatggggggacctcgcactgttgtggcaggcagcagcgacgctgcccaaaaggctgtccgggcaatggcagtgctgacagatcacccatatgcctccctgaccctcccagatgacgcagctgctgactgtctctttcttcgtcctgggttgcctggtgtgccccctttcctcctgcaccgtggaggtggggatctgcccaacagccaggaggcactgcagaagctctctgatgtcaccctggtacctgtgtcctgctcagaactggagaaggctggcgccgggctcagctccctctgcttggtgctcagcacacgcccccacagctgagggcctggccttggggtactgctggccaggggtaggatagtataggaagtagaaggggaaggagggttagatagagaatgctgaataggcagtagttgggagagagcctcaatattgggggaggggagagtgtagggaaaaggatccactgggtgaatcctccctctcagaaccaataaaatagaattgaccttttaaaaaaaaaaaanannnnnaannannnnnnagggcggccgctccctatagtgagtcgtattaagcttaattanctgancttggactcctgttganaaatccagnaatgacctcaaaactcccatctggatttttttcaaaaacgctcggttgccnccgggcgtttttttatttggtgaaaaatcccanctancttggcnanatttttanggancctaangnaacctaaaaatggaaaaaaaaaatcnctggganaaaccccccgttgaaaaaatccccaatggnnatccaaaaaaaaaattttnaggcnntttcaatnnanttgccccanggaaccnaaaaaccaaaaccnttcnactgganattaacggccttttttaaanacccnnaaaaaaaaaaaaaaccccaaaatttttttcccgncctttnattcaatttttnnccccccccgnaanaaaggnncncncccnnanttttnttnnggnaannaaaaaannngaaacctggggaantaggaaaaaagnttnccccntttttaacnccntttttcnanaaaaaaannnaaaaatttttnncccccgnnannaaaaacnaaaaaaattccngcnattttannanatattccaaaaangggnggtttacggnaaanntgcccttttcccaaanggttttnaaaaannttttcttcccccaccccgggnantttcccnttttttttaaanggncnaanaaaantntttncccttttcnggnnaaantntanngnananntnnnnctnnnnnnttttttn

SEQ ID NO: 186 - DNA, 1280 bp, Homo Sapiens
  misc_feature (658)..(658): n is a, c, g, or t
  misc_feature (661)..(664): n is a, c, g, or t
  misc_feature (771)..(771): n is a, c, g, or t
  misc_feature (789)..(789): n is a, c, g, or t
  misc_feature (872)..(872): n is a, c, g, or t
  misc_feature (877)..(877): n is a, c, g, or t
  misc_feature (885)..(885): n is a, c, g, or t
  misc_feature (955)..(955): n is a, c, g, or t
  misc_feature (963)..(963): n is a, c, g, or t
  misc_feature (966)..(966): n is a, c, g, or t
  misc_feature (968)..(968): n is a, c, g, or t
  misc_feature (974)..(974): n is a, c, g, or t
  misc_feature (979)..(979): n is a, c, g, or t
  misc_feature (988)..(988): n is a, c, g, or t
  misc_feature (990)..(990): n is a, c, g, or t
  misc_feature (1007)..(1007): n is a, c, g, or t
  misc_feature (1022)..(1022): n is a, c, g, or t
  misc_feature (1035)..(1035): n is a, c, g, or t
  misc_feature (1039)..(1039): n is a, c, g, or t
  misc_feature (1055)..(1055): n is a, c, g, or t
  misc_feature (1069)..(1069): n is a, c, g, or t
  misc_feature (1071)..(1071): n is a, c, g, or t
  misc_feature (1073)..(1073): n is a, c, g, or t
  misc_feature (1093)..(1093): n is a, c, g, or t
  misc_feature (1105)..(1105): n is a, c, g, or t
  misc_feature (1107)..(1107): n is a, c, g, or t
  misc_feature (1121)..(1121): n is a, c, g, or t
  misc_feature (1132)..(1132): n is a, c, g, or t
  misc_feature (1138)..(1138): n is a, c, g, or t
  misc_feature (1143)..(1145): n is a, c, g, or t
  misc_feature (1159)..(1159): n is a, c, g, or t
  misc_feature (1164)..(1164): n is a, c, g, or t
  misc_feature (1166)..(1166): n is a, c, g, or t
  misc_feature (1188)..(1188): n is a, c, g, or t
  misc_feature (1191)..(1191): n is a, c, g, or t
  misc_feature (1194)..(1194): n is a, c, g, or t
  misc_feature (1198)..(1199): n is a, c, g, or t
  misc_feature (1202)..(1202): n is a, c, g, or t
  misc_feature (1208)..(1209): n is a, c, g, or t
  misc_feature (1213)..(1213): n is a, c, g, or t
  misc_feature (1220)..(1220): n is a, c, g, or t
  misc_feature (1231)..(1231): n is a, c, g, or t
  misc_feature (1233)..(1233): n is a, c, g, or t
  misc_feature (1241)..(1241): n is a, c, g, or t
  misc_feature (1252)..(1252): n is a, c, g, or t
  misc_feature (1260)..(1260): n is a, c, g, or t
  misc_feature (1271)..(1271): n is a, c, g, or t
  misc_feature (1277)..(1277): n is a, c, g, or t
atagagaaattactatgagaggatcgcatcaccatcaccatcacggatcctatttaggtgacactatagaatcgtcgacccacgcgtccggtgaaaagaaggcacggaaggctatgtccaaactgggtcttcggcaggttacaggagttactagagtcactatccggaaatctaagaatatcctctttgtcatcacaaaaccagatgtctacaagagccctgcttcagatacttacatagtttttggggaagccaagatcgaagatttatcccagcaagcacaactagcagctgctgagaaattcaaagttcaaggtgaagctgtctcaaacattcaagaaaacacacagactccaactgtacaagaggagagtgaagaggaagaggtcgatgaaacaggtgtagaagttaaggacatagaattggtcatgtcacaagcaaatgtgtcgagagcaaaggcagtccgagccctgaagaacaacagtaatgatattgtaaatgcgattatggaattaacaatgtaaccatatggaagcaactttttttggtgtctcaaaggagtaactgcagcttggtttgaaatttgtactgtttctatcataaataaagttatggcttcttgttggatgaaaaaaaaaaaaaaaaaaaaaaaaaaaanaannnnggggcggccgctccctatagtgagtcgtattaagcttaattagctgagcttggactcctgttgatagatccagtaatgacctcagaactccatctggatttgttcanaacgctcggttgccgccngggcgttttttattggtgagaatccaagctagcttggcgagattttcaggagctaaggaagctaaaatggagaaaaaaaatcnctggnatataccnccgttgatatatcccaatggccatcgtaaagaacattttgaggcatttcagtcagttgctcaatgtaccntataaccngancngttcanctggnaaatttacngncccttttttaaaaaccngtaaaaaaaaataanccccaagtttttntccnggccttttattcccanttctttcccccccngnangaatgccccctcccgggaantttcctatggcnantggaaaaacggggnactgggggganatgggnaaaannnttccccccttgttnacccngnttttcccttggaaccaaacttnaanccntttnnccncccccnngggngggaaanccccccccccnantttccggnggtttttccanccattttnttcccccaaangggggnggg

SEQ ID NO: 187 - DNA, 1269 bp, Homo Sapiens
  misc_feature (124)..(124): n is a, c, g, or t
  misc_feature (190)..(190): n is a, c, g, or t
  misc_feature (425)..(425): n is a, c, g, or t
  misc_feature (677)..(677): n is a, c, g, or t
  misc_feature (718)..(718): n is a, c, g, or t
  misc_feature (781)..(781): n is a, c, g, or t
  misc_feature (788)..(788): n is a, c, g, or t
  misc_feature (792)..(792): n is a, c, g, or t
  misc_feature (840)..(840): n is a, c, g, or t
  misc_feature (852)..(852): n is a, c, g, or t
  misc_feature (880)..(880): n is a, c, g, or t
  misc_feature (884)..(884): n is a, c, g, or t
  misc_feature (915)..(915): n is a, c, g, or t
  misc_feature (924)..(924): n is a, c, g, or t
  misc_feature (926)..(926): n is a, c, g, or t
  misc_feature (929)..(930): n is a, c, g, or t
  misc_feature (940)..(940): n is a, c, g, or t
  misc_feature (942)..(942): n is a, c, g, or t
  misc_feature (951)..(951): n is a, c, g, or t
  misc_feature (955)..(955): n is a, c, g, or t
  misc_feature (958)..(958): n is a, c, g, or t
  misc_feature (964)..(964): n is a, c, g, or t
  misc_feature (970)..(971): n is a, c, g, or t
  misc_feature (985)..(985): n is a, c, g, or t
  misc_feature (989)..(989): n is a, c, g, or t
  misc_feature (991)..(991): n is a, c, g, or t
  misc_feature (997)..(997): n is a, c, g, or t
  misc_feature (1004)..(1005): n is a, c, g, or t
  misc_feature (1011)..(1011): n is a, c, g, or t
  misc_feature (1017)..(1017): n is a, c, g, or t
  misc_feature (1028)..(1028): n is a, c, g, or t
  misc_feature (1032)..(1032): n is a, c, g, or t
  misc_feature (1038)..(1038): n is a, c, g, or t
  misc_feature (1044)..(1044): n is a, c, g, or t
  misc_feature (1046)..(1046): n is a, c, g, or t
  misc_feature (1060)..(1060): n is a, c, g, or t
  misc_feature (1063)..(1063): n is a, c, g, or t
  misc_feature (1071)..(1071): n is a, c, g, or t
  misc_feature (1074)..(1074): n is a, c, g, or t
  misc_feature (1078)..(1078): n is a, c, g, or t
  misc_feature (1084)..(1084): n is a, c, g, or t
  misc_feature (1086)..(1088): n is a, c, g, or t
  misc_feature (1090)..(1090): n is a, c, g, or t
  misc_feature (1095)..(1095): n is a, c, g, or t
  misc_feature (1104)..(1104): n is a, c, g, or t
  misc_feature (1107)..(1107): n is a, c, g, or t
  misc_feature (1110)..(1110): n is a, c, g, or t
  misc_feature (1116)..(1117): n is a, c, g, or t
  misc_feature (1120)..(1120): n is a, c, g, or t
  misc_feature (1122)..(1122): n is a, c, g, or t
  misc_feature (1141)..(1141): n is a, c, g, or t
  misc_feature (1143)..(1145): n is a, c, g, or t
  misc_feature (1148)..(1148): n is a, c, g, or t
  misc_feature (1157)..(1157): n is a, c, g, or t
  misc_feature (1161)..(1161): n is a, c, g, or t
  misc_feature (1163)..(1164): n is a, c, g, or t
  misc_feature (1169)..(1169): n is a, c, g, or t
  misc_feature (1171)..(1172): n is a, c, g, or t
  misc_feature (1175)..(1175): n is a, c, g, or t
  misc_feature (1178)..(1179): n is a, c, g, or t
  misc_feature (1181)..(1181): n is a, c, g, or t
  misc_feature (1185)..(1185): n is a, c, g, or t
  misc_feature (1192)..(1192): n is a, c, g, or t
  misc_feature (1197)..(1198): n is a, c, g, or t
  misc_feature (1200)..(1200): n is a, c, g, or t
  misc_feature (1206)..(1206): n is a, c, g, or t
  misc_feature (1208)..(1208): n is a, c, g, or t
  misc_feature (1218)..(1218): n is a, c, g, or t
  misc_feature (1225)..(1226): n is a, c, g, or t
  misc_feature (1237)..(1237): n is a, c, g, or t
  misc_feature (1240)..(1240): n is a, c, g, or t
  misc_feature (1250)..(1250): n is a, c, g, or t
  misc_feature (1253)..(1253): n is a, c, g, or t
  misc_feature (1258)..(1259): n is a, c, g, or t
aaattagagaaaaattactatgagaggatcgcatcaccatcaccatcacgggatcctatttaggtgacactatagaatcggtcgacccacgcgttccggccgtgaagaggagcaagcgcccganggtcgggacctagacatgctgtttcctgggggggctgggaggctgccactgaacttcacccatcanacacccccatggcgggaggagtacaaggggcaggtgaacctgcacgtgtttgaggactggtgtgggggcgccgtgggccacctgaggaggaacctgcacttcccgctgttccctcatacgcgcaccaccgtgaagaagttggccgtgtcccccaagtggaagaactatggactccgtatttttggtttcatccacccggcgagggacggagacgtccagttttctgtggcctcanacgacaactcggagttctggctgagtctggacgagagccctgctgctgcccagcttgtggcctttgtgggcaagactggctccgagtggacagcgcctggagaattcaccaagttcagctcccaggtgtccaagcccaggcggctcatggcctcccggaggtactactttgagttgctgcacaagcaggacgaccgcggctcggaccacgtggaagtgggctggcgagctttcctgcccggcctgaagttcnaggtcatcagctctgctcacatctccctgtacacagatgantcagccttgaagatggaccacgtggcgcacgtcccccagtctccatccagccacgtggggggncgtccgnccgnaggaggagaccagcgcaaaacatgcttgcggccagatcccaggggatncttttttcctcnctccacgcatggaaatcttccaagcctngaanaacgtgctggaaccctgcgcctacccccccncctacgtgntnaannacttcccgantngccaaatanccanggncctgcnaatttnngtacctgtccttcntttntncccaanaactaannttcccntcaccnaattggaaaangganaaaagnggtttntnccccaaattcttcnctntttttggnaangttnggtttntnnnantactntaaaatggncanggngaaggnnatnantatataaaaaaaaaatttnannnccnatctttttnttcntnnaccgnannaanttnntnaaanaaaaaanaaagnnanattttncnaaactgtaancctccanngttcccccccnaanaatgttcccnatnccccnncaatatcccc

SEQ ID NO: 188 - DNA, 256 bp, Homo Sapiens
taagaggagaattaactatgagaggatcgcatcaccatcaccatcacggatcctatttaggtgacactatagaatcgtcgacccacgcgtccgcaacggtgaagacggaaaccatcagttttggcagtgtttcaccgggaggagtaaagctagaaatttccacgaaggaagtgccagtagttcacaccgaaaccaaaaccatcacatatgaatcatcacaggtcgatccaggcacagatctggagccaggcgtgct

SEQ ID NO: 189 - DNA, 256 bp, Homo Sapiens
ttactatgagaggatcgcatcaccatcaccatcacggatcctatttaggtgacactatagaatcgtcgacccacgcgtccgccaagaatgccaggaatgatttcctgaaagaggtgaagatcatgtcgaggctcaaggaccccaacatcattcggctgctgggcgtgtgtgtgcaggacgaccccctctgcatgattactgactacatggagaacggcgacctcaaccagttcctcagtgcccaccagctggagga

SEQ ID NO: 190 - DNA, 1222 bp, Homo Sapiens
  misc_feature (807)..(807): n is a, c, g, or t
  misc_feature (914)..(914): n is a, c, g, or t
  misc_feature (922)..(922): n is a, c, g, or t
  misc_feature (945)..(945): n is a, c, g, or t
  misc_feature (967)..(967): n is a, c, g, or t
  misc_feature (974)..(974): n is a, c, g, or t
  misc_feature (988)..(988): n is a, c, g, or t
  misc_feature (996)..(996): n is a, c, g, or t
  misc_feature (1056)..(1056): n is a, c, g, or t
  misc_feature (1075)..(1075): n is a, c, g, or t
  misc_feature (1077)..(1077): n is a, c, g, or t
  misc_feature (1101)..(1101): n is a, c, g, or t
  misc_feature (1107)..(1107): n is a, c, g, or t
  misc_feature (1110)..(1110): n is a, c, g, or t
  misc_feature (1116)..(1116): n is a, c, g, or t
  misc_feature (1142)..(1142): n is a, c, g, or t
  misc_feature (1151)..(1151): n is a, c, g, or t
  misc_feature (1163)..(1163): n is a, c, g, or t
  misc_feature (1168)..(1168): n is a, c, g, or t
  misc_feature (1180)..(1180): n is a, c, g, or t
  misc_feature (1185)..(1185): n is a, c, g, or t
  misc_feature (1198)..(1198): n is a, c, g, or t
  misc_feature (1203)..(1203): n is a, c, g, or t
  misc_feature (1205)..(1207): n is a, c, g, or t
  misc_feature (1219)..(1219): n is a, c, g, or t
attagagaaattactatgagaggatcgcatcaccatcaccatcacggatcctatttaggtgacactatagaatcgtcgacccacgcgtccgctcaggacctggaaatgtatggaatcaactatttcgagataaaaaacaagaaaggaacagacctttggcttggagttgatgcccttggactgaatatttatgagaaagatgataagttaaccccaaagattggctttccttggagtgaaatcaggaacatctctttcaatgacaaaaagtttgtcattaaacccatcgacaagaaggcacctgactttgtgttttatgccccacgtctgagaatcaacaagcggatcctgcagctctgcatgggcaaccatgagttgtatatgcgccgcaggaagcctgacaccatcgaggtgcagcagatgaaggcccaggcccgggaggagaagcatcagaagcagctggagcggcaacagctggaaacagagaagaaaaggagagaaaccgtggagagagagaaagagcagatgatgcgcgagaaggaggagttgatgctgcggctgcaggactatgaggagaagacaaagaaggcagagagagagctctcggagcagattcagagggccctgcagctggaggaggagaggaagcgggcacaggaggaggccgagcgcctagaggctgaccgtatggctgcactgcgggctaaggaggagctggagagacaggcggtggatcagataaagagccaggagcagctggctgcggagcttgcagaatacactgccaagattgccctcctggaagangcgcggaggcgcaaggaggatgaagttgaagagtggcagcacagggccaaagaagcccaggatgacctggtgaaaaccaaggaggagctgcacctggtgatgacagnacccccgnccccaccaccccccgtgtacganccggtgagctaccatgtccagnaaagctngcaggatgagggcncaaacccncgggctacagcgcggaactgtctagtgaggcctccgggatgaccccatgaggaaaacccntcctgaggcaaaaaaaacnancgtgtgcacggcactgctgacctnaacacnagnttcccngcccaaatgaaataaagaccccatgncttctcccnacgaaactgggnggggnggaaaataaaanctggnggaatcggggggnacccnannncctcccaatttngcc

SEQ ID NO: 191 - DNA, 256 bp, Homo Sapiens
  misc_feature (91)..(91): n is a, c, g, or t
  misc_feature (99)..(101): n is a, c, g, or t
  misc_feature (109)..(109): n is a, c, g, or t
  misc_feature (117)..(117): n is a, c, g, or t
  misc_feature (123)..(123): n is a, c, g, or t
  misc_feature (194)..(194): n is a, c, g, or t
  misc_feature (196)..(198): n is a, c, g, or t
  misc_feature (200)..(200): n is a, c, g, or t
  misc_feature (203)..(204): n is a, c, g, or t
  misc_feature (206)..(206): n is a, c, g, or t
  misc_feature (211)..(211): n is a, c, g, or t
  misc_feature (218)..(218): n is a, c, g, or t
  misc_feature (223)..(223): n is a, c, g, or t
  misc_feature (229)..(229): n is a, c, g, or t
  misc_feature (231)..(231): n is a, c, g, or t
  misc_feature (234)..(236): n is a, c, g, or t
  misc_feature (239)..(239): n is a, c, g, or t
  misc_feature (241)..(241): n is a, c, g, or t
  misc_feature (244)..(244): n is a, c, g, or t
  misc_feature (246)..(246): n is a, c, g, or t
  misc_feature (248)..(248): n is a, c, g, or t
  misc_feature (252)..(252): n is a, c, g, or t
tagagaaattactatgagaggatcgcatcaccatcaccatcacggatcctatttaggtgacactatagaatcgtcgacccacgcgtccganaacattgnnnatgccaanaaagatgntgtgtnacactaagcatgtttgaggagctcaagagccgtctggacaccctgatcccagagaggtggccctgaatgantnnntnacnngncctgnttacgtnctgcntgaagntnacnnnggngnacntnanatgntttc

SEQ ID NO: 192 - DNA, 256 bp, Homo Sapiens
  misc_feature (5)..(5): n is a, c, g, or t
ttaangaggagaattaactatgagaggatcgcatcaccatcaccatcacggatcctatttaggtgacactatagaatcgtcgacccacgcgtccgcccacgcgtccgcccacgcgtccgatggaccagaaccatccattgaggttttccagccatcaaataaggaaggatttgggctgggtcttcagttgaaaaagatcctgggtatgtttacatcccaacaatggaaacatctgagcaatgatttcttgaagacc

SEQ ID NO: 193 - DNA, 256 bp, Homo Sapiens
  misc_feature (7)..(7): n is a, c, g, or t
tagaggnaaattactatgagaggatcgcatcaccatcaccatcacggatcctatttaggtgacactatagaatcgtcgacccacgcgtccgagaaagtgtacgacccaaagaatgaggaggacgacatgcgggagatggaggaggagcgactgcgcatgcgggagcatgtgatgaagaatgtggacaccaaccaggaccgcctcgtgaccctggaggagttcctcgcatccactcagaggaaggagtttggggaca

SEQ ID NO: 194 - DNA, 256 bp, Homo Sapiens
  misc_feature (2)..(2): n is a, c, g, or t
tnagaggagaaattaactatgagaggatcgcatcaccatcaccatcacggatcctatttaggtgacactatagaatcgtcgacccacgcgtccgaagtgagcaagctggtgaccgacaaggctgcaggaaagattactgatgccttcagttctctggccaagaggagcaattttcgtgccatcagcaaaaagctgaatttgatcccacgtgtggacggcgagtatgatctgaaagtgccccgagacatggcttacg

SEQ ID NO: 195 - DNA, 1220 bp, Homo Sapiens
  misc_feature (859)..(859): n is a, c, g, or t
  misc_feature (869)..(869): n is a, c, g, or t
  misc_feature (902)..(902): n is a, c, g, or t
  misc_feature (916)..(916): n is a, c, g, or t
  misc_feature (933)..(933): n is a, c, g, or t
  misc_feature (972)..(972): n is a, c, g, or t
  misc_feature (988)..(988): n is a, c, g, or t
  misc_feature (1002)..(1002): n is a, c, g, or t
  misc_feature (1008)..(1008): n is a, c, g, or t
  misc_feature (1018)..(1018): n is a, c, g, or t
  misc_feature (1044)..(1044): n is a, c, g, or t
  misc_feature (1046)..(1046): n is a, c, g, or t
  misc_feature (1065)..(1065): n is a, c, g, or t
  misc_feature (1067)..(1067): n is a, c, g, or t
  misc_feature (1069)..(1069): n is a, c, g, or t
  misc_feature (1077)..(1077): n is a, c, g, or t
  misc_feature (1081)..(1081): n is a, c, g, or t
  misc_feature (1104)..(1104): n is a, c, g, or t
  misc_feature (1112)..(1112): n is a, c, g, or t
  misc_feature (1116)..(1116): n is a, c, g, or t
  misc_feature (1120)..(1120): n is a, c, g, or t
  misc_feature (1124)..(1124): n is a, c, g, or t
  misc_feature (1126)..(1126): n is a, c, g, or t
  misc_feature (1135)..(1135): n is a, c, g, or t
  misc_feature (1145)..(1145): n is a, c, g, or t
  misc_feature (1154)..(1154): n is a, c, g, or t
  misc_feature (1161)..(1161): n is a, c, g, or t
  misc_feature (1183)..(1183): n is a, c, g, or t
  misc_feature (1196)..(1196): n is a, c, g, or t
  misc_feature (1204)..(1204): n is a, c, g, or t
  misc_feature (1207)..(1207): n is a, c, g, or t
  misc_feature (1216)..(1216): n is a, c, g, or t
atagagaaattactatgagaggatcgcatcaccatcaccatcacggatcctatttaggtgacactatagaatcgtcgacccacgcgtccgtagataatgccttaatacgtcctggtcgttttgacatgcaagttacagttccaaggccagatgtaaaaggtcgaacagaaattttgaaatggtatctcaataaaataaagtttgatcaatccgttgatccagaaattatagctcgaggtactgttggcttttccggagcagagttggagaatcttgtgaaccaggctgcattaaaagcagctgttgatggaaaagaaatggttaccatgaaggagctggagttttccaaagacaaaattctaatggggcctgaaagaagaagtgtggaaattgataacaaaaacaaaaccatcacagcatatcatgaatctggtcatgccattattgcatattacacaaaagatgcaatgcctatcaacaaagctacaatcatgccacgggggccaacacttggacatgtgtccctgttacctgagaatgacagatggaatgaaactagagcccagctgcttgcacaaatggatgttagtatgggaggaagagtggcagaggagcttatatttggaaccgaccatattacaacaggtgcttccagtgattttgataatgccactaaaatagcaaagcggatggttaccaaatttggaatgagtgaaaagcttggagttatgacctacagtgatacagggaaactaagtccagaaacccaatctgccatcgaacaagaaataagaatccttctaagggactcatatgaacgagcaaaacatatcttgaaactcatgcaaaggagcataanaatctcgcanaagctttattgacctatgaaactttggatgccnaagagattccaatngttcttgaggggaaaangtgggaagtgagatgataactctcttgatatggatgctngctggttttatgcaanaataaagtagcatngcatantctactttanacgctttcccccattctgatgggggnantgaaggggggaaagcttgncnanccttgccnattntcccgttggggtttcccctaganccctttgnaatnaccncccngnaaatttttngaaaaataanacttccggntgaaccnaaaaaaaaaaaaaaaaaaaaangggggccccccanggggccanaanctataccgncggc

SEQ ID NO: 196 - DNA, 1195 bp, Homo Sapiens
  misc_feature (967)..(967): n is a, c, g, or t
  misc_feature (975)..(975): n is a, c, g, or t
  misc_feature (982)..(982): n is a, c, g, or t
  misc_feature (1002)..(1002): n is a, c, g, or t
  misc_feature (1010)..(1010): n is a, c, g, or t
  misc_feature (1024)..(1024): n is a, c, g, or t
  misc_feature (1032)..(1032): n is a, c, g, or t
  misc_feature (1059)..(1059): n is a, c, g, or t
  misc_feature (1070)..(1070): n is a, c, g, or t
  misc_feature (1075)..(1075): n is a, c, g, or t
  misc_feature (1082)..(1082): n is a, c, g, or t
  misc_feature (1102)..(1102): n is a, c, g, or t
  misc_feature (1105)..(1105): n is a, c, g, or t
  misc_feature (1112)..(1112): n is a, c, g, or t
  misc_feature (1121)..(1121): n is a, c, g, or t
  misc_feature (1132)..(1132): n is a, c, g, or t
  misc_feature (1139)..(1139): n is a, c, g, or t
  misc_feature (1142)..(1142): n is a, c, g, or t
  misc_feature (1149)..(1149): n is a, c, g, or t
  misc_feature (1151)..(1152): n is a, c, g, or t
  misc_feature (1162)..(1162): n is a, c, g, or t
  misc_feature (1164)..(1165): n is a, c, g, or t
  misc_feature (1168)..(1169): n is a, c, g, or t
  misc_feature (1176)..(1176): n is a, c, g, or t
  misc_feature (1178)..(1178): n is a, c, g, or t
  misc_feature (1184)..(1184): n is a, c, g, or t
  misc_feature (1189)..(1189): n is a, c, g, or t
  misc_feature (1191)..(1191): n is a, c, g, or t
gaatagagaaattactatgagaggatcgcatcaccatcaccatcacggatcctatttaggtgacactatagaatcgtcgacccacgcgtccgggggctcaggaccagctgcaaaccgacccaccgtgaaagtttgtggcacctgcaccatcagggcgacatgcactttggttctctgtgtttcaaaaaagacccagaggaattggagccacccaaagaaagcagagtcaaacgcaaggaagagaaagcagcaagccctgcagaggtgttggggggtcagtgctcaggcgtgggagttcgaagatcaccctcaagtacaggaaggagtggagtagtgtccgtcttctcctgggacagtcctgagagatgggcagcatccagttagatctggttccatggaacaccagctctccagacggtaggaataggaattacatgaaaagggctttgggagtcaggccagtttgggaaatgcagggttaaaccaaactcacaagttttcttgaggcaggttttcctggagctcctagataactcccaagcatcacactgtccacggacacgtgggccgcctcccaggctcttgtgagcccagcacctggtttttgcagtcttttgtttggctctcccacccccttacaccctttgggaactgctgagtcagatatacagaagaacagtcactgcgagggctgttaaactctcaggaaaggtaccaaagtgcatggcagcgtttggccccagtgagctggaaaacactttcgtctggtcttgagatgtttcctgcagcacaagaggttggcagagcaacctcagaacctcttctgtctctgtttatgcttttgttcagaagcttagtaccaggaattaatctcagctccttcccagaggattttaggcacacagggatcttttattctgcacttctccagtgatgctttcaacacaattgtatcaaaacagcctangctattcncttacangccctgcttttgccctgggnaatcttancacctcatttttantaagtacncttgcaaatccgaaaaggcaggtggangtaaaatccantgtcntctgcantggggggcctgccctggccntcnccaaaanggggctctncgaaatgggancccctgnagntttttantnncccaaaaaanannganngggtttnanaaatgnccctntngccc

SEQ ID NO: 197 - DNA, 1240 bp, Homo Sapiens
  misc_feature (98)..(98): n is a, c, g, or t
  misc_feature (104)..(104): n is a, c, g, or t
  misc_feature (143)..(143): n is a, c, g, or t
  misc_feature (152)..(152): n is a, c, g, or t
  misc_feature (164)..(164): n is a, c, g, or t
  misc_feature (230)..(230): n is a, c, g, or t
  misc_feature (266)..(266): n is a, c, g, or t
  misc_feature (367)..(367): n is a, c, g, or t
  misc_feature (385)..(385): n is a, c, g, or t
  misc_feature (399)..(399): n is a, c, g, or t
  misc_feature (411)..(411): n is a, c, g, or t
  misc_feature (420)..(420): n is a, c, g, or t
  misc_feature (436)..(436): n is a, c, g, or t
  misc_feature (449)..(450): n is a, c, g, or t
  misc_feature (454)..(454): n is a, c, g, or t
  misc_feature (457)..(458): n is a, c, g, or t
  misc_feature (460)..(460): n is a, c, g, or t
  misc_feature (546)..(546): n is a, c, g, or t
  misc_feature (576)..(576): n is a, c, g, or t
  misc_feature (589)..(589): n is a, c, g, or t
  misc_feature (591)..(591): n is a, c, g, or t
  misc_feature (599)..(599): n is a, c, g, or t
  misc_feature (607)..(607): n is a, c, g, or t
  misc_feature (610)..(611): n is a, c, g, or t
  misc_feature (615)..(615): n is a, c, g, or t
  misc_feature (617)..(617): n is a, c, g, or t
  misc_feature (657)..(658): n is a, c, g, or t
  misc_feature (671)..(671): n is a, c, g, or t
  misc_feature (682)..(682): n is a, c, g, or t
  misc_feature (708)..(708): n is a, c, g, or t
  misc_feature (721)..(721): n is a, c, g, or t
  misc_feature (724)..(724): n is a, c, g, or t
  misc_feature (740)..(740): n is a, c, g, or t
  misc_feature (749)..(749): n is a, c, g, or t
  misc_feature (766)..(766): n is a, c, g, or t
  misc_feature (786)..(786): n is a, c, g, or t
  misc_feature (808)..(808): n is a, c, g, or t
  misc_feature (812)..(812): n is a, c, g, or t
  misc_feature (816)..(816): n is a, c, g, or t
  misc_feature (844)..(844): n is a, c, g, or t
  misc_feature (850)..(850): n is a, c, g, or t
  misc_feature (866)..(866): n is a, c, g, or t
  misc_feature (874)..(874): n is a, c, g, or t
  misc_feature (880)..(880): n is a, c, g, or t
  misc_feature (891)..(891): n is a, c, g, or t
  misc_feature (903)..(903): n is a, c, g, or t
  misc_feature (910)..(910): n is a, c, g, or t
  misc_feature (914)..(914): n is a, c, g, or t
  misc_feature (922)..(923): n is a, c, g, or t
  misc_feature (926)..(926): n is a, c, g, or t
  misc_feature (931)..(931): n is a, c, g, or t
  misc_feature (935)..(935): n is a, c, g, or t
  misc_feature (939)..(939): n is a, c, g, or t
  misc_feature (943)..(943): n is a, c, g, or t
  misc_feature (949)..(949): n is a, c, g, or t
  misc_feature (953)..(953): n is a, c, g, or t
  misc_feature (960)..(960): n is a, c, g, or t
  misc_feature (965)..(965): n is a, c, g, or t
  misc_feature (977)..(977): n is a, c, g, or t
  misc_feature (984)..(984): n is a, c, g, or t
  misc_feature (989)..(989): n is a, c, g, or t
  misc_feature (991)..(991): n is a, c, g, or t
  misc_feature (1000)..(1000): n is a, c, g, or t
  misc_feature (1005)..(1005): n is a, c, g, or t
  misc_feature (1013)..(1013): n is a, c, g, or t
  misc_feature (1016)..(1016): n is a, c, g, or t
  misc_feature (1018)..(1018): n is a, c, g, or t
  misc_feature (1032)..(1032): n is a, c, g, or t
  misc_feature (1035)..(1035): n is a, c, g, or t
  misc_feature (1038)..(1038): n is a, c, g, or t
  misc_feature (1040)..(1041): n is a, c, g, or t
  misc_feature (1053)..(1053): n is a, c, g, or t
  misc_feature (1058)..(1058): n is a, c, g, or t
  misc_feature (1063)..(1063): n is a, c, g, or t
  misc_feature (1068)..(1069): n is a, c, g, or t
  misc_feature (1075)..(1075): n is a, c, g, or t
  misc_feature (1084)..(1084): n is a, c, g, or t
  misc_feature (1087)..(1087): n is a, c, g, or t
  misc_feature (1101)..(1101): n is a, c, g, or t
  misc_feature (1117)..(1118): n is a, c, g, or t
  misc_feature (1125)..(1126): n is a, c, g, or t
  misc_feature (1132)..(1132): n is a, c, g, or t
  misc_feature (1136)..(1136): n is a, c, g, or t
  misc_feature (1139)..(1139): n is a, c, g, or t
  misc_feature (1149)..(1149): n is a, c, g, or t
  misc_feature (1152)..(1152): n is a, c, g, or t
  misc_feature (1159)..(1159): n is a, c, g, or t
  misc_feature (1167)..(1167): n is a, c, g, or t
  misc_feature (1174)..(1174): n is a, c, g, or t
  misc_feature (1189)..(1189): n is a, c, g, or t
  misc_feature (1195)..(1195): n is a, c, g, or t
  misc_feature (1198)..(1198): n is a, c, g, or t
  misc_feature (1206)..(1207): n is a, c, g, or t
  misc_feature (1213)..(1213): n is a, c, g, or t
  misc_feature (1219)..(1219): n is a, c, g, or t
  misc_feature (1224)..(1224): n is a, c, g, or t
  misc_feature (1233)..(1233): n is a, c, g, or t
  misc_feature (1235)..(1235): n is a, c, g, or t
tagagaaattactatgagaggatcgcatcaccatcaccatcacggatcctatttaggtgacactatagaatcgtcgacccacgcgtccggtcgagganaggaanatgcactggtcaccaagaacctggtccctggggaatcantttatgganagaagagagtcncgatttcggaaggagatgacaaaattgagtaccgagcctggaaccccttccgctccaagctagcancatcaatcctgggtggtgtggaccaaatccacatcngaccgggggctaaggttctctacctcggggctgcctcgggcaccacggtctcccatgtctctgacatcgttggtccggatggtctagtctatgcagtcganttctcccaccgctctggncgtgacctcattancttggccaagangaggaccancatcattcctgtgatngaggatgctcganncccncannantaccgcatgctcatcgcaatggtggatgtgatctttgctgatgtggcccagccagaccagacccggattgtggccctgaatgcccncaccttcctgcgtaatggaggacactttgngatttccattaangncaactgcnttgactcnacnncctnanccgaggccgtgtttgcctccgaagtgaaaaagatgcaacnngaataacatgaanccgcaggagcngttgacccttgagccatatgaaaganaccatgccgtggncgngggagtgtacaggccncccccccangtgaagaactgaaattnagcgctgtcaggattgcganagatgtgtgttgatactgttgnacgngtgnttttctattagaagactcatccgtctcngagcanattaacatcttctttngactatgntggganaaatttggaanacaaaaaagganaatttcnagcngggggggnngcnccctncctntcgnggantttttnaccntttattngcctnaaccttggaccnccttttnttaantncattgaatngaccnccaaaacnccnancttgatttggtctnaanacncnnggttggcgccgngggcnttttnttggnngaaaancccgccccnttngggggaaaatttcngggacctaaggaaccnnaaggggnnaaaaancccnggnaaaccccggnttnaattccnttgggaantttaaanaattttgggggtttngggccnttntccgggannttaacnggaccntcccnggaataaancntttta

SEQ ID NO: 198 - DNA, 256 bp, Homo Sapiens
ccgcacctacaccagccaacccagatcccgaggtccgacagcgcccggcccagatccccacgcctgccaggagcaagccgagagccagccggccggcgcactccgactccgagcagtctctgtccttcgacccgagccccgcgccctttccgggacccctgccccgcgggcagcgctgccaacctgccggccatggagaccccgtcccagcggcgcgccacccgcagcggggcgcaggccagctccactccgctgt

SEQ ID NO: 199 - DNA, 1200 bp, Homo Sapiens
  misc_feature (3)..(3): n is a, c, g, or t
  misc_feature (7)..(7): n is a, c, g, or t
  misc_feature (17)..(17): n is a, c, g, or t
  misc_feature (22)..(22): n is a, c, g, or t
  misc_feature (25)..(25): n is a, c, g, or t
  misc_feature (67)..(67): n is a, c, g, or t
  misc_feature (81)..(81): n is a, c, g, or t
  misc_feature (91)..(91): n is a, c, g, or t
  misc_feature (116)..(116): n is a, c, g, or t
  misc_feature (184)..(184): n is a, c, g, or t
  misc_feature (229)..(229): n is a, c, g, or t
  misc_feature (245)..(245): n is a, c, g, or t
  misc_feature (282)..(282): n is a, c, g, or t
  misc_feature (294)..(294): n is a, c, g, or t
  misc_feature (337)..(337): n is a, c, g, or t
  misc_feature (343)..(343): n is a, c, g, or t
  misc_feature (364)..(364): n is a, c, g, or t
  misc_feature (371)..(371): n is a, c, g, or t
  misc_feature (391)..(391): n is a, c, g, or t
  misc_feature (396)..(396): n is a, c, g, or t
  misc_feature (415)..(416): n is a, c, g, or t
  misc_feature (419)..(419): n is a, c, g, or t
  misc_feature (423)..(424): n is a, c, g, or t
  misc_feature (427)..(427): n is a, c, g, or t
  misc_feature (429)..(429): n is a, c, g, or t
  misc_feature (450)..(450): n is a, c, g, or t
  misc_feature (455)..(455): n is a, c, g, or t
  misc_feature (485)..(485): n is a, c, g, or t
  misc_feature (506)..(508): n is a, c, g, or t
  misc_feature (514)..(514): n is a, c, g, or t
  misc_feature (516)..(516): n is a, c, g, or t
  misc_feature (532)..(532): n is a, c, g, or t
  misc_feature (543)..(543): n is a, c, g, or t
  misc_feature (550)..(550): n is a, c, g, or t
  misc_feature (563)..(563): n is a, c, g, or t
  misc_feature (584)..(584): n is a, c, g, or t
  misc_feature (586)..(586): n is a, c, g, or t
  misc_feature (589)..(589): n is a, c, g, or t
  misc_feature (593)..(593): n is a, c, g, or t
  misc_feature (604)..(604): n is a, c, g, or t
  misc_feature (614)..(614): n is a, c, g, or t
  misc_feature (621)..(622): n is a, c, g, or t
  misc_feature (633)..(634): n is a, c, g, or t
  misc_feature (640)..(640): n is a, c, g, or t
  misc_feature (658)..(659): n is a, c, g, or t
  misc_feature (661)..(661): n is a, c, g, or t
  misc_feature (668)..(668): n is a, c, g, or t
  misc_feature (678)..(678): n is a, c, g, or t
  misc_feature (682)..(682): n is a, c, g, or t
  misc_feature (695)..(695): n is a, c, g, or t
  misc_feature (699)..(699): n is a, c, g, or t
  misc_feature (701)..(701): n is a, c, g, or t
  misc_feature (707)..(707): n is a, c, g, or t
  misc_feature (726)..(726): n is a, c, g, or t
  misc_feature (731)..(731): n is a, c, g, or t
  misc_feature (745)..(745): n is a, c, g, or t
  misc_feature (750)..(750): n is a, c, g, or t
  misc_feature (762)..(762): n is a, c, g, or t
  misc_feature (764)..(767): n is a, c, g, or t
  misc_feature (779)..(779): n is a, c, g, or t
  misc_feature (781)..(782): n is a, c, g, or t
  misc_feature (786)..(787): n is a, c, g, or t
  misc_feature (790)..(790): n is a, c, g, or t
  misc_feature (795)..(795): n is a, c, g, or t
  misc_feature (797)..(797): n is a, c, g, or t
  misc_feature (830)..(830): n is a, c, g, or t
  misc_feature (832)..(832): n is a, c, g, or t
  misc_feature (834)..(834): n is a, c, g, or t
  misc_feature (836)..(836): n is a, c, g, or t
  misc_feature (838)..(838): n is a, c, g, or t
  misc_feature (861)..(861): n is a, c, g, or t
  misc_feature (863)..(863): n is a, c, g, or t
  misc_feature (873)..(873): n is a, c, g, or t
  misc_feature (876)..(876): n is a, c, g, or t
  misc_feature (906)..(906): n is a, c, g, or t
  misc_feature (923)..(923): n is a, c, g, or t
  misc_feature (927)..(927): n is a, c, g, or t
  misc_feature (935)..(937): n is a, c, g, or t
  misc_feature (951)..(951): n is a, c, g, or t
  misc_feature (954)..(954): n is a, c, g, or t
  misc_feature (961)..(963): n is a, c, g, or t
  misc_feature (971)..(971): n is a, c, g, or t
  misc_feature (981)..(982): n is a, c, g, or t
  misc_feature (984)..(985): n is a, c, g, or t
  misc_feature (990)..(992): n is a, c, g, or t
  misc_feature (994)..(994): n is a, c, g, or t
  misc_feature (1010)..(1010): n is a, c, g, or t
  misc_feature (1015)..(1015): n is a, c, g, or t
  misc_feature (1018)..(1018): n is a, c, g, or t
  misc_feature (1026)..(1027): n is a, c, g, or t
  misc_feature (1034)..(1034): n is a, c, g, or t
  misc_feature (1036)..(1038): n is a, c, g, or t
  misc_feature (1045)..(1046): n is a, c, g, or t
  misc_feature (1053)..(1053): n is a, c, g, or t
  misc_feature (1055)..(1055): n is a, c, g, or t
  misc_feature (1072)..(1072): n is a, c, g, or t
  misc_feature (1074)..(1075): n is a, c, g, or t
  misc_feature (1084)..(1084): n is a, c, g, or t
  misc_feature (1093)..(1095): n is a, c, g, or t
  misc_feature (1099)..(1100): n is a, c, g, or t
  misc_feature (1105)..(1105): n is a, c, g, or t
  misc_feature (1116)..(1116): n is a, c, g, or t
  misc_feature (1118)..(1118): n is a, c, g, or t
  misc_feature (1125)..(1125): n is a, c, g, or t
  misc_feature (1130)..(1130): n is a, c, g, or t
  misc_feature (1136)..(1137): n is a, c, g, or t
  misc_feature (1139)..(1140): n is a, c, g, or t
  misc_feature (1143)..(1143): n is a, c, g, or t
  misc_feature (1147)..(1147): n is a, c, g, or t
  misc_feature (1155)..(1156): n is a, c, g, or t
  misc_feature (1159)..(1159): n is a, c, g, or t
  misc_feature (1162)..(1164): n is a, c, g, or t
  misc_feature (1169)..(1170): n is a, c, g, or t
  misc_feature (1172)..(1173): n is a, c, g, or t
  misc_feature (1176)..(1178): n is a, c, g, or t
  misc_feature (1181)..(1181): n is a, c, g, or t
  misc_feature (1186)..(1187): n is a, c, g, or t
  misc_feature (1190)..(1190): n is a, c, g, or t
aanaaantagagaaaanttacntangagaggatcgcatcaccatcaccatcacggtatcctatttangatgacacttattnttaatcgtcnacccacgtcgtccgggcggcgtccncggtttcgcaggtctttcgctgagcgtctctgcttagccgcggtcatgagccggcacagtccggctgnagaggcaggttctgagcctgtaccgcgatctgctgcgcgccgggngtgggaagccgggcgncgaggcgcgagtgcgggcagagttccggcagcatgcnggcctgccgcgntccgacgtgctgcgcatcgagtacctgtaccgccgcgggcggngccagntgcagctgctacgctcgggcnacgccancgccatgggcgccttcgtangcccncgggccccgaccggggagnntgncggnntgngntcccagcctgacgacggctanagtcnaaggaacccccacaacagttacgggggcancggagacccggcccgactgannnagacangnaaatagccaaaactcnctcgatggcanggtgganccaggaagctcgnctgactgcatggggggactgngnaanccancctaaggtganagatcttaanaaactannttgacgaattnnggatgncatagactcctccttggnnangcaaggngcctacagancccnttgatggactgcnaggnangccccncctttttcgatgcttgganactgntctgtgctcctccnccatnatggcttagtgntnnnnccttgtgaaaantnntcgnnctngcacngntgttcaaagcccaattagcttatttgacccaangngnancntgggacccagaatgaaccccccnanggaacaaggnganaatcctgaaaaacttcccttctctttgaancccatggaaaaaaatancccnatttcctnnntccctccaaagaanttnccccccnnnccccctgntaatttaaanntnnaaaannngnaaaaaccttttttttncaaanaancttttttnngcaatgntnnncccttcnnccaaacngntttaaaaaaggccaggnannccccttttntgggaaaannntttnnacccnttttaatttgntnaaaaaanccccncaaccnntnnttnaaanggggatannggnttnnntaaanncnnggnnntantttannttnaaaaaccccc

SEQ ID NO: 200 - DNA, 1501 bp, Homo Sapiens
  misc_feature (3)..(3): n is a, c, g, or t
  misc_feature (8)..(8): n is a, c, g, or t
  misc_feature (18)..(18): n is a, c, g, or t
  misc_feature (28)..(28): n is a, c, g, or t
  misc_feature (32)..(32): n is a, c, g, or t
  misc_feature (34)..(34): n is a, c, g, or t
  misc_feature (55)..(55): n is a, c, g, or t
  misc_feature (59)..(59): n is a, c, g, or t
  misc_feature (76)..(76): n is a, c, g, or t
  misc_feature (81)..(81): n is a, c, g, or t
  misc_feature (83)..(83): n is a, c, g, or t
  misc_feature (96)..(97): n is a, c, g, or t
  misc_feature (108)..(110): n is a, c, g, or t
  misc_feature (140)..(141): n is a, c, g, or t
  misc_feature (155)..(156): n is a, c, g, or t
  misc_feature (161)..(161): n is a, c, g, or t
  misc_feature (174)..(174): n is a, c, g, or t
  misc_feature (179)..(179): n is a, c, g, or t
  misc_feature (190)..(190): n is a, c, g, or t
  misc_feature (204)..(204): n is a, c, g, or t
  misc_feature (206)..(206): n is a, c, g, or t
  misc_feature (213)..(213): n is a, c, g, or t
  misc_feature (215)..(215): n is a, c, g, or t
  misc_feature (225)..(225): n is a, c, g, or t
  misc_feature (228)..(228): n is a, c, g, or t
  misc_feature (234)..(234): n is a, c, g, or t
  misc_feature (236)..(236): n is a, c, g, or t
  misc_feature (241)..(241): n is a, c, g, or t
  misc_feature (243)..(244): n is a, c, g, or t
  misc_feature (250)..(250): n is a, c, g, or t
  misc_feature (252)..(252): n is a, c, g, or t
  misc_feature (255)..(255): n is a, c, g, or t
  misc_feature (261)..(261): n is a, c, g, or t
  misc_feature (264)..(264): n is a, c, g, or t
  misc_feature (274)..(274): n is a, c, g, or t
  misc_feature (283)..(283): n is a, c, g, or t
  misc_feature (285)..(285): n is a, c, g, or t
  misc_feature (296)..(296): n is a, c, g, or t
  misc_feature (310)..(311): n is a, c, g, or t
  misc_feature (323)..(323): n is a, c, g, or t
  misc_feature (331)..(331): n is a, c, g, or t
  misc_feature (334)..(334): n is a, c, g, or t
  misc_feature (350)..(350): n is a, c, g, or t
  misc_feature (355)..(355): n is a, c, g, or t
  misc_feature (359)..(359): n is a, c, g, or t
  misc_feature (364)..(364): n is a, c, g, or t
  misc_feature (366)..(366): n is a, c, g, or t
  misc_feature (369)..(369): n is a, c, g, or t
  misc_feature (371)..(373): n is a, c, g, or t
  misc_feature (378)..(378): n is a, c, g, or t
  misc_feature (385)..(385): n is a, c, g, or t
  misc_feature (407)..(407): n is a, c, g, or t
  misc_feature (411)..(411): n is a, c, g, or t
  misc_feature (418)..(418): n is a, c, g, or t
  misc_feature (425)..(426): n is a, c, g, or t
  misc_feature (433)..(433): n is a, c, g, or t
  misc_feature (443)..(443): n is a, c, g, or t
  misc_feature (477)..(477): n is a, c, g, or t
  misc_feature (480)..(480): n is a, c, g, or t
  misc_feature (491)..(491): n is a, c, g, or t
  misc_feature (499)..(499): n is a, c, g, or t
  misc_feature (503)..(503): n is a, c, g, or t
  misc_feature (536)..(536): n is a, c, g, or t
  misc_feature (538)..(539): n is a, c, g, or t
  misc_feature (544)..(544): n is a, c, g, or t
  misc_feature (548)..(548): n is a, c, g, or t
  misc_feature (585)..(585): n is a, c, g, or t
  misc_feature (587)..(587): n is a, c, g, or t
  misc_feature (591)..(591): n is a, c, g, or t
  misc_feature (598)..(598): n is a, c, g, or t
  misc_feature (605)..(605): n is a, c, g, or t
  misc_feature (616)..(616): n is a, c, g, or t
  misc_feature (619)..(619): n is a, c, g, or t
  misc_feature (621)..(621): n is a, c, g, or t
  misc_feature (624)..(624): n is a, c, g, or t
  misc_feature (631)..(631): n is a, c, g, or t
  misc_feature (637)..(640): n is a, c, g, or t
  misc_feature (646)..(647): n is a, c, g, or t
  misc_feature (655)..(655): n is a, c, g, or t
  misc_feature (660)..(660): n is a, c, g, or t
  misc_feature (662)..(662): n is a, c, g, or t
  misc_feature (668)..(668): n is a, c, g, or t
  misc_feature (670)..(670): n is a, c, g, or t
  misc_feature (675)..(675): n is a, c, g, or t
  misc_feature (688)..(688): n is a, c, g, or t
  misc_feature (692)..(692): n is a, c, g, or t
  misc_feature (711)..(711): n is a, c, g, or t
  misc_feature (713)..(713): n is a, c, g, or t
  misc_feature (715)..(715): n is a, c, g, or t
  misc_feature (718)..(718): n is a, c, g, or t
  misc_feature (720)..(720): n is a, c, g, or t
  misc_feature (732)..(732): n is a, c, g, or t
  misc_feature (734)..(736): n is a, c, g, or t
  misc_feature (741)..(741): n is a, c, g, or t
  misc_feature (757)..(757): n is a, c, g, or t
  misc_feature (762)..(762): n is a, c, g, or t
  misc_feature (780)..(782): n is a, c, g, or t
  misc_feature (792)..(792): n is a, c, g, or t
  misc_feature (794)..(794): n is a, c, g, or t
  misc_feature (800)..(800): n is a, c, g, or t
  misc_feature (805)..(805): n is a, c, g, or t
  misc_feature (811)..(811): n is a, c, g, or t
  misc_feature (814)..(814): n is a, c, g, or t
  misc_feature (816)..(817): n is a, c, g, or t
  misc_feature (824)..(825): n is a, c, g, or t
  misc_feature (827)..(827): n is a, c, g, or t
  misc_feature (830)..(831): n is a, c, g, or t
  misc_feature (835)..(835): n is a, c, g, or t
  misc_feature (844)..(844): n is a, c, g, or t
  misc_feature (847)..(848): n is a, c, g, or t
  misc_feature (853)..(853): n is a, c, g, or t
  misc_feature (862)..(862): n is a, c, g, or t
  misc_feature (869)..(869): n is a, c, g, or t
  misc_feature (874)..(874): n is a, c, g, or t
  misc_feature (876)..(876): n is a, c, g, or t
  misc_feature (884)..(884): n is a, c, g, or t
  misc_feature (889)..(889): n is a, c, g, or t
  misc_feature (894)..(894): n is a, c, g, or t
  misc_feature (908)..(908): n is a, c, g, or t
  misc_feature (915)..(915): n is a, c, g, or t
  misc_feature (919)..(919): n is a, c, g, or t
  misc_feature (926)..(926): n is a, c, g, or t
  misc_feature (930)..(931): n is a, c, g, or t
  misc_feature (933)..(934): n is a, c, g, or t
  misc_feature (938)..(938): n is a, c, g, or t
  misc_feature (948)..(948): n is a, c, g, or t
  misc_feature (950)..(951): n is a, c, g, or t
  misc_feature (956)..(956): n is a, c, g, or t
  misc_feature (958)..(958): n is a, c, g, or t
  misc_feature (963)..(963): n is a, c, g, or t
  misc_feature (967)..(968): n is a, c, g, or t
  misc_feature (971)..(971): n is a, c, g, or t
  misc_feature (974)..(974): n is a, c, g, or t
  misc_feature (979)..(980): n is a, c, g, or t
  misc_feature (982)..(983): n is a, c, g, or t
  misc_feature (987)..(987): n is a, c, g, or t
  misc_feature (990)..(990): n is a, c, g, or t
  misc_feature (995)..(995): n is a, c, g, or t
  misc_feature (997)..(997): n is a, c, g, or t
  misc_feature (1000)..(1000): n is a, c, g, or t
  misc_feature (1002)..(1003): n is a, c, g, or t
  misc_feature (1005)..(1006): n is a, c, g, or t
  misc_feature (1015)..(1016): n is a, c, g, or t
  misc_feature (1024)..(1026): n is a, c, g, or t
  misc_feature (1029)..(1029): n is a, c, g, or t
  misc_feature (1033)..(1034): n is a, c, g, or t
  misc_feature (1044)..(1047): n is a, c, g, or t
  misc_feature (1052)..(1052): n is a, c, g, or t
  misc_feature (1056)..(1056): n is a, c, g, or t
  misc_feature (1058)..(1058): n is a, c, g, or t
  misc_feature (1061)..(1063): n is a, c, g, or t
  misc_feature (1065)..(1065): n is a, c, g, or t
  misc_feature (1067)..(1067): n is a, c, g, or t
  misc_feature (1069)..(1069): n is a, c, g, or t
  misc_feature (1079)..(1079): n is a, c, g, or t
  misc_feature (1084)..(1086): n is a, c, g, or t
  misc_feature (1091)..(1091): n is a, c, g, or t
  misc_feature (1094)..(1094): n is a, c, g, or t
  misc_feature (1097)..(1098): n is a, c, g, or t
  misc_feature (1107)..(1107): n is a, c, g, or t
  misc_feature (1110)..(1110): n is a, c, g, or t
  misc_feature (1119)..(1121): n is a, c, g, or t
  misc_feature (1125)..(1125): n is a, c, g, or t
  misc_feature (1129)..(1131): n is a, c, g, or t
  misc_feature (1133)..(1133): n is a, c, g, or t
  misc_feature (1135)..(1136): n is a, c, g, or t
  misc_feature (1142)..(1142): n is a, c, g, or t
  misc_feature (1145)..(1145): n is a, c, g, or t
  misc_feature (1147)..(1147): n is a, c, g, or t
  misc_feature (1149)..(1149): n is a, c, g, or t
  misc_feature (1158)..(1158): n is a, c, g, or t
  misc_feature (1161)..(1162): n is a, c, g, or t
  misc_feature (1166)..(1167): n is a, c, g, or t
  misc_feature (1169)..(1169): n is a, c, g, or t
  misc_feature (1171)..(1177): n is a, c, g, or t
  misc_feature (1180)..(1180): n is a, c, g, or t
  misc_feature (1184)..(1184): n is a, c, g, or t
  misc_feature (1186)..(1186): n is a, c, g, or t
  misc_feature (1192)..(1192): n is a, c, g, or t
  misc_feature (1195)..(1195): n is a, c, g, or t
  misc_feature (1198)..(1199): n is a, c, g, or t
  misc_feature (1201)..(1202): n is a, c, g, or t
  misc_feature (1213)..(1214): n is a, c, g, or t
  misc_feature (1217)..(1217): n is a, c, g, or t
  misc_feature (1229)..(1229): n is a, c, g, or t
  misc_feature (1236)..(1236): n is a, c, g, or t
  misc_feature (1244)..(1245): n is a, c, g, or t
  misc_feature (1252)..(1253): n is a, c, g, or t
  misc_feature (1258)..(1258): n is a, c, g, or t
  misc_feature (1264)..(1264): n is a, c, g, or t
  misc_feature (1271)..(1272): n is a, c, g, or t
  misc_feature (1275)..(1275): n is a, c, g, or t
  misc_feature (1277)..(1280): n is a, c, g, or t
  misc_feature (1284)..(1284): n is a, c, g, or t
  misc_feature (1288)..(1288): n is a, c, g, or t
  misc_feature (1292)..(1292): n is a, c, g, or t
  misc_feature (1294)..(1295): n is a, c, g, or t
  misc_feature (1298)..(1298): n is a, c, g, or t
  misc_feature (1300)..(1300): n is a, c, g, or t
  misc_feature (1302)..(1302): n is a, c, g, or t
  misc_feature (1304)..(1306): n is a, c, g, or t
  misc_feature (1309)..(1309): n is a, c, g, or t
  misc_feature (1312)..(1313): n is a, c, g, or t
  misc_feature (1318)..(1320): n is a, c, g, or t
  misc_feature (1322)..(1322): n is a, c, g, or t
  misc_feature (1329)..(1330): n is a, c, g, or t
  misc_feature (1332)..(1332): n is a, c, g, or t
  misc_feature (1334)..(1335): n is a, c, g, or t
  misc_feature (1340)..(1341): n is a, c, g, or t
  misc_feature (1347)..(1348): n is a, c, g, or t
  misc_feature (1352)..(1352): n is a, c, g, or t
  misc_feature (1358)..(1359): n is a, c, g, or t
  misc_feature (1365)..(1365): n is a, c, g, or t
  misc_feature (1381)..(1382): n is a, c, g, or t
  misc_feature (1389)..(1390): n is a, c, g, or t
  misc_feature (1394)..(1394): n is a, c, g, or t
  misc_feature (1396)..(1396): n is a, c, g, or t
  misc_feature (1401)..(1402): n is a, c, g, or t
  misc_feature (1405)..(1405): n is a, c, g, or t
  misc_feature (1412)..(1412): n is a, c, g, or t
  misc_feature (1416)..(1416): n is a, c, g, or t
  misc_feature (1424)..(1424): n is a, c, g, or t
  misc_feature (1431)..(1431): n is a, c, g, or t
  misc_feature (1437)..(1437): n is a, c, g, or t
  misc_feature (1440)..(1440): n is a, c, g, or t
  misc_feature (1444)..(1444): n is a, c, g, or t
  misc_feature (1447)..(1447): n is a, c, g, or t
  misc_feature (1451)..(1452): n is a, c, g, or t
  misc_feature (1454)..(1454): n is a, c, g, or t
  misc_feature (1458)..(1458): n is a, c, g, or t
  misc_feature (1463)..(1463): n is a, c, g, or t
  misc_feature (1473)..(1473): n is a, c, g, or t
  misc_feature (1477)..(1477): n is a, c, g, or t
  misc_feature (1482)..(1482): n is a, c, g, or t
  misc_feature (1484)..(1484): n is a, c, g, or t
  misc_feature (1492)..(1492): n is a, c, g, or t
  misc_feature (1499)..(1500): n is a, c, g, or t
tanaaganagaaattaanttgggggggntggntngccttccccctccccggcttnggtnttttagttgagtgaaanatatngnatcctccaccctnncgtccgtcccnnncgctccgattgagggaaaagtttctttcannagctctcaatctcnntcggngtcgacggatccntactngggtgaaaagncctacaaatgtgangnatgtgcnanaaagcttctnccngagctnanatctnanncaacancntanaattcngantggagaaaanccctatcancngtgatgagtgnggccggtgtttctnncagagctcccancttattcntcntcagagaacccacacnggggngaanccctncnagngnnntgaangcggacnatgtttcagttgacagctctcnctcngaggccncccatgnnggtgcanaacaaacagnaagcctcgtgaaaacccggggcaaaaatatccangangaaaactcacnttaacctnttgnaaagctggtacaggaaggaagtctgtggttggncnnctttnaaantatagggctttttgacagcctttttgaagacctcttncnaaanaataaantgtactnaaatgacaggnatncnttnattaaanaataannnntgcttnnatagccancattngncttttntntaacngccattcttttgnttangtgacgaacaactattgtngnanttntnccgaattttatntnnngctgnaaagcaaaattaccanttagntccaggttttcccttcannntctttttatntngttganatagncaaccnatnanngagtttnnanaanntacngtttttgtnggnnaagantggacattncccttgnaaccntnttttgganaattnttttncctattttttcaanaaaaccnctanatggttntcgnncnntatntcattttttntnnaaaananaaccncttnnatnttntttcnnanntttnaanttttntnaananntnntctgttctnnccccattnnncancccnncctttttttnnnncttanttgntngcnnncnananattttttttngtggnnnaaaanaanttnnagttccccnccnacctttctnnnaaantccnnncncnntcaatnganantnttttttttncannaaanntntnnnnnnnaanaatntncctccnttnggnntnntacaccccctnntanttttcaccctanttaaaangttttttnnatccccnngaaantttttnaaatttnntantnnnnacanttcntcantnntcngntntnnnttnttnnttatnnntntctcttnntntnncatanntttctnnctanataacnntccctnctaagctctacctccnncttttanntctntnttatnnatntctgacntctnattctatncacatantctctntcnatantgnctcnncntcantccanccatcttagntgantcatngntagagacnctctctnnt

SEQ ID NO: 201 - DNA, 1396 bp, Homo Sapiens
  misc_feature (796)..(796): n is a, c, g, or t
  misc_feature (816)..(816): n is a, c, g, or t
  misc_feature (826)..(826): n is a, c, g, or t
  misc_feature (832)..(832): n is a, c, g, or t
  misc_feature (853)..(853): n is a, c, g, or t
  misc_feature (868)..(868): n is a, c, g, or t
  misc_feature (874)..(874): n is a, c, g, or t
  misc_feature (884)..(884): n is a, c, g, or t
  misc_feature (923)..(923): n is a, c, g, or t
  misc_feature (944)..(944): n is a, c, g, or t
  misc_feature (948)..(948): n is a, c, g, or t
  misc_feature (952)..(952): n is a, c, g, or t
  misc_feature (961)..(961): n is a, c, g, or t
  misc_feature (973)..(974): n is a, c, g, or t
  misc_feature (977)..(977): n is a, c, g, or t
  misc_feature (982)..(982): n is a, c, g, or t
  misc_feature (997)..(998): n is a, c, g, or t
  misc_feature (1000)..(1000): n is a, c, g, or t
  misc_feature (1007)..(1007): n is a, c, g, or t
  misc_feature (1011)..(1011): n is a, c, g, or t
  misc_feature (1030)..(1030): n is a, c, g, or t
  misc_feature (1034)..(1034): n is a, c, g, or t
  misc_feature (1036)..(1036): n is a, c, g, or t
  misc_feature (1041)..(1041): n is a, c, g, or t
  misc_feature (1043)..(1043): n is a, c, g, or t
  misc_feature (1052)..(1053): n is a, c, g, or t
  misc_feature (1064)..(1065): n is a, c, g, or t
  misc_feature (1069)..(1070): n is a, c, g, or t
  misc_feature (1089)..(1091): n is a, c, g, or t
  misc_feature (1103)..(1103): n is a, c, g, or t
  misc_feature (1105)..(1105): n is a, c, g, or t
  misc_feature (1118)..(1118): n is a, c, g, or t
  misc_feature (1138)..(1138): n is a, c, g, or t
  misc_feature (1151)..(1151): n is a, c, g, or t
  misc_feature (1153)..(1153): n is a, c, g, or t
  misc_feature (1155)..(1155): n is a, c, g, or t
  misc_feature (1161)..(1161): n is a, c, g, or t
  misc_feature (1163)..(1163): n is a, c, g, or t
  misc_feature (1169)..(1169): n is a, c, g, or t
  misc_feature (1171)..(1171): n is a, c, g, or t
  misc_feature (1176)..(1176): n is a, c, g, or t
  misc_feature (1180)..(1181): n is a, c, g, or t
  misc_feature (1184)..(1185): n is a, c, g, or t
  misc_feature (1187)..(1187): n is a, c, g, or t
  misc_feature (1197)..(1198): n is a, c, g, or t
  misc_feature (1207)..(1207): n is a, c, g, or t
  misc_feature (1210)..(1211): n is a, c, g, or t
  misc_feature (1216)..(1216): n is a, c, g, or t
  misc_feature (1218)..(1218): n is a, c, g, or t
  misc_feature (1229)..(1229): n is a, c, g, or t
  misc_feature (1231)..(1231): n is a, c, g, or t
  misc_feature (1236)..(1236): n is a, c, g, or t
  misc_feature (1239)..(1241): n is a, c, g, or t
  misc_feature (1254)..(1254): n is a, c, g, or t
  misc_feature (1266)..(1266): n is a, c, g, or t
  misc_feature (1276)..(1276): n is a, c, g, or t
  misc_feature (1282)..(1282): n is a, c, g, or t
  misc_feature (1291)..(1291): n is a, c, g, or t
  misc_feature (1299)..(1299): n is a, c, g, or t
  misc_feature (1305)..(1306): n is a, c, g, or t
  misc_feature (1314)..(1314): n is a, c, g, or t
  misc_feature (1321)..(1326): n is a, c, g, or t
  misc_feature (1329)..(1329): n is a, c, g, or t
  misc_feature (1333)..(1333): n is a, c, g, or t
  misc_feature (1335)..(1336): n is a, c, g, or t
  misc_feature (1339)..(1341): n is a, c, g, or t
  misc_feature (1343)..(1343): n is a, c, g, or t
  misc_feature (1346)..(1346): n is a, c, g, or t
  misc_feature (1348)..(1348): n is a, c, g, or t
  misc_feature (1362)..(1363): n is a, c, g, or t
  misc_feature (1371)..(1371): n is a, c, g, or t
  misc_feature (1376)..(1376): n is a, c, g, or t
  misc_feature (1380)..(1381): n is a, c, g, or t
  misc_feature (1386)..(1386): n is a, c, g, or t
  misc_feature (1390)..(1390): n is a, c, g, or t
  misc_feature (1392)..(1396): n is a, c, g, or t
atagagaaattactatgagaggatcgcatcaccatcaccatcacggatcctatttaggtgacactatagaatcgtcgacccacgcgtccgcccacgcgtccgagcagagtattggtgctgctggaagccagaaggaaggtccagagggagccaacctgttcatctaccacctgccccaggagtttggtgatcaggacctgctgcagatgtttatgccctttgggaatgtcgtgtctgccaaggttttcatagacaagcagacaaacctgagcaagtgttttggttttgtaagttacgacaatcctgtttcggcccaagctgccatccagtccatgaacggctttcagattggcatgaagcggcttaaagtgcagctcaaacgttcgaagaatgacagcaagccctactgagcgtgctcccctctgagactggagtgagagggtcttctggtaagtgggggaggagcacccttaatgattcgaagccctgaggctgtgtgttgacagccctggaccctgatccctgccactctcgcaggcacagcttgccctgaagactcggctactgccttctgtgggagtttcgcttcgtacagaggacaagtttgtgctttggtttccagtgttttactttggagtttaggtgccatatcctgaggttttttttgtttttgtttttgtttctcctttatttaaagtttgctgtgtttgtaaccagtgtgtgttgagaaggaccaacaccaaaccaccctggggaagggggacagggaaacatttaacacagacgatgatcaggnatttgccccaaaccaccccnagaaaaaagnactgantggaacaaaaaagtgaccccnaaaacctcctcttantgtganggtgggttanaatgaaaactgacccctgggaacctgtggggaacaaaancggcctttgggggaaaaaatnggantgancaaaacccntaatgccctggnnagntgganaactcaaactcctgnnanagctacntttngggaaaaaattttttgaancccnanttttncnaaatctttnnccggaaatttnnggcnngcccttttcaaaaaaaggnnntttaacaattcncnggaaaaaaaacancctgttaaccccgaaataancaaaaaaaggggngnancccccntntaaaantnccccncccnnaannanaattggattnncctttcccnggnnggggncnttttggaaaananccccnaannnttatttttttccncccaattaaacnggcccttttnaagggnccttttaancccccaanaaaaannccgggttnttttttnnnnnnccncaanannaannncnccncncccccctttttttnnaaaaaacnaaaantttnnttttntaangnnnnn

SEQ ID NO: 202 - DNA, 256 bp, Homo Sapiens
  misc_feature (2)..(2): n is a, c, g, or t
  misc_feature (7)..(7): n is a, c, g, or t
  misc_feature (10)..(11): n is a, c, g, or t
  misc_feature (20)..(20): n is a, c, g, or t
  misc_feature (24)..(25): n is a, c, g, or t
  misc_feature (27)..(27): n is a, c, g, or t
  misc_feature (30)..(30): n is a, c, g, or t
  misc_feature (32)..(32): n is a, c, g, or t
  misc_feature (40)..(40): n is a, c, g, or t
  misc_feature (43)..(43): n is a, c, g, or t
  misc_feature (46)..(46): n is a, c, g, or t
  misc_feature (53)..(53): n is a, c, g, or t
  misc_feature (59)..(59): n is a, c, g, or t
  misc_feature (68)..(70): n is a, c, g, or t
  misc_feature (73)..(73): n is a, c, g, or t
  misc_feature (75)..(75): n is a, c, g, or t
  misc_feature (82)..(82): n is a, c, g, or t
  misc_feature (86)..(87): n is a, c, g, or t
  misc_feature (95)..(95): n is a, c, g, or t
  misc_feature (97)..(97): n is a, c, g, or t
  misc_feature (102)..(103): n is a, c, g, or t
  misc_feature (105)..(105): n is a, c, g, or t
  misc_feature (107)..(107): n is a, c, g, or t
  misc_feature (109)..(109): n is a, c, g, or t
  misc_feature (111)..(111): n is a, c, g, or t
  misc_feature (113)..(115): n is a, c, g, or t
  misc_feature (117)..(118): n is a, c, g, or t
  misc_feature (126)..(126): n is a, c, g, or t
  misc_feature (136)..(136): n is a, c, g, or t
  misc_feature (138)..(138): n is a, c, g, or t
  misc_feature (147)..(147): n is a, c, g, or t
  misc_feature (149)..(149): n is a, c, g, or t
  misc_feature (151)..(151): n is a, c, g, or t
  misc_feature (156)..(156): n is a, c, g, or t
  misc_feature (164)..(167): n is a, c, g, or t
  misc_feature (170)..(170): n is a, c, g, or t
  misc_feature (180)..(180): n is a, c, g, or t
  misc_feature (183)..(184): n is a, c, g, or t
  misc_feature (186)..(187): n is a, c, g, or t
  misc_feature (197)..(197): n is a, c, g, or t
  misc_feature (199)..(199): n is a, c, g, or t
  misc_feature (201)..(202): n is a, c, g, or t
  misc_feature (205)..(210): n is a, c, g, or t
  misc_feature (213)..(214): n is a, c, g, or t
  misc_feature (217)..(217): n is a, c, g, or t
  misc_feature (219)..(222): n is a, c, g, or t
  misc_feature (226)..(227): n is a, c, g, or t
  misc_feature (230)..(231): n is a, c, g, or t
  misc_feature (234)..(234): n is a, c, g, or t
  misc_feature (236)..(236): n is a, c, g, or t
  misc_feature (238)..(238): n is a, c, g, or t
  misc_feature (240)..(242): n is a, c, g, or t
  misc_feature (244)..(244): n is a, c, g, or t
  misc_feature (247)..(249): n is a, c, g, or t
  misc_feature (252)..(252): n is a, c, g, or t
gnagganggnnggagtaaangagnngnggncntcattccngcntcnataatcncctcgntctctcccnnnccncnccccccncccnncgcgcaangngctcnncncncncncnnncnnaccccccngccccgcccncncgccccccncncncgcgncctcctcnnnncgnaggaaggtcnccnncnncgagcagccnantnncgnnnnnnagnnggngnnnncgannganngtngnangnnntnggnnnaanggtg

SEQ ID NO: 203 - DNA, 1386 bp, Homo Sapiens
  misc_feature (3)..(3): n is a, c, g, or t
  misc_feature (5)..(5): n is a, c, g, or t
  misc_feature (81)..(81): n is a, c, g, or t
  misc_feature (123)..(123): n is a, c, g, or t
  misc_feature (158)..(158): n is a, c, g, or t
  misc_feature (172)..(172): n is a, c, g, or t
  misc_feature (185)..(185): n is a, c, g, or t
  misc_feature (215)..(215): n is a, c, g, or t
  misc_feature (260)..(261): n is a, c, g, or t
  misc_feature (286)..(286): n is a, c, g, or t
  misc_feature (288)..(288): n is a, c, g, or t
  misc_feature (296)..(297): n is a, c, g, or t
  misc_feature (311)..(311): n is a, c, g, or t
  misc_feature (319)..(320): n is a, c, g, or t
  misc_feature (322)..(322): n is a, c, g, or t
  misc_feature (325)..(325): n is a, c, g, or t
  misc_feature (328)..(328): n is a, c, g, or t
  misc_feature (338)..(338): n is a, c, g, or t
  misc_feature (355)..(355): n is a, c, g, or t
  misc_feature (368)..(369): n is a, c, g, or t
  misc_feature (386)..(386): n is a, c, g, or t
  misc_feature (409)..(409): n is a, c, g, or t
  misc_feature (412)..(412): n is a, c, g, or t
  misc_feature (414)..(414): n is a, c, g, or t
  misc_feature (425)..(426): n is a, c, g, or t
  misc_feature (428)..(428): n is a, c, g, or t
  misc_feature (432)..(432): n is a, c, g, or t
  misc_feature (435)..(435): n is a, c, g, or t
  misc_feature (442)..(442): n is a, c, g, or t
  misc_feature (458)..(458): n is a, c, g, or t
  misc_feature (461)..(461): n is a, c, g, or t
  misc_feature (467)..(467): n is a, c, g, or t
  misc_feature (475)..(475): n is a, c, g, or t
  misc_feature (479)..(479): n is a, c, g, or t
  misc_feature (483)..(483): n is a, c, g, or t
  misc_feature (495)..(496): n is a, c, g, or t
  misc_feature (506)..(506): n is a, c, g, or t
  misc_feature (526)..(526): n is a, c, g, or t
  misc_feature (532)..(532): n is a, c, g, or t
  misc_feature (538)..(538): n is a, c, g, or t
  misc_feature (542)..(542): n is a, c, g, or t
  misc_feature (548)..(548): n is a, c, g, or t
  misc_feature (552)..(552): n is a, c, g, or t
  misc_feature (556)..(556): n is a, c, g, or t
  misc_feature (558)..(558): n is a, c, g, or t
  misc_feature (583)..(584): n is a, c, g, or t
  misc_feature (588)..(588): n is a, c, g, or t
  misc_feature (592)..(592): n is a, c, g, or t
  misc_feature (600)..(601): n is a, c, g, or t
  misc_feature (611)..(612): n is a, c, g, or t
  misc_feature (614)..(614): n is a, c, g, or t
  misc_feature (616)..(617): n is a, c, g, or t
  misc_feature (621)..(621): n is a, c, g, or t
  misc_feature (627)..(627): n is a, c, g, or t
  misc_feature (629)..(629): n is a, c, g, or t
  misc_feature (642)..(642): n is a, c, g, or t
  misc_feature (650)..(651): n is a, c, g, or t
  misc_feature (657)..(657): n is a, c, g, or t
  misc_feature (663)..(663): n is a, c, g, or t
  misc_feature (675)..(676): n is a, c, g, or t
  misc_feature (694)..(694): n is a, c, g, or t
  misc_feature (696)..(696): n is a, c, g, or t
  misc_feature (712)..(714): n is a, c, g, or t
  misc_feature (718)..(718): n is a, c, g, or t
  misc_feature (720)..(720): n is a, c, g, or t
  misc_feature (724)..(724): n is a, c, g, or t
  misc_feature (735)..(735): n is a, c, g, or t
  misc_feature (741)..(741): n is a, c, g, or t
  misc_feature (744)..(745): n is a, c, g, or t
  misc_feature (750)..(750): n is a, c, g, or t
  misc_feature (752)..(752): n is a, c, g, or t
  misc_feature (758)..(758): n is a, c, g, or t
  misc_feature (761)..(761): n is a, c, g, or t
  misc_feature (768)..(768): n is a, c, g, or t
  misc_feature (771)..(771): n is a, c, g, or t
  misc_feature (777)..(777): n is a, c, g, or t
  misc_feature (780)..(780): n is a, c, g, or t
  misc_feature (782)..(782): n is a, c, g, or t
  misc_feature (796)..(796): n is a, c, g, or t
  misc_feature (798)..(798): n is a, c, g, or t
  misc_feature (803)..(803): n is a, c, g, or t
  misc_feature (807)..(808): n is a, c, g, or t
  misc_feature (810)..(810): n is a, c, g, or t
  misc_feature (812)..(812): n is a, c, g, or t
  misc_feature (816)..(816): n is a, c, g, or t
  misc_feature (818)..(819): n is a, c, g, or t
  misc_feature (828)..(828): n is a, c, g, or t
  misc_feature (831)..(831): n is a, c, g, or t
  misc_feature (833)..(833): n is a, c, g, or t
  misc_feature (835)..(835): n is a, c, g, or t
  misc_feature (852)..(852): n is a, c, g, or t
  misc_feature (857)..(857): n is a, c, g, or t
  misc_feature (859)..(860): n is a, c, g, or t
  misc_feature (862)..(862): n is a, c, g, or t
  misc_feature (864)..(864): n is a, c, g, or t
  misc_feature (866)..(866): n is a, c, g, or t
  misc_feature (875)..(876): n is a, c, g, or t
  misc_feature (879)..(879): n is a, c, g, or t
  misc_feature (883)..(883): n is a, c, g, or t
  misc_feature (886)..(888): n is a, c, g, or t
  misc_feature (892)..(894): n is a, c, g, or t
  misc_feature (901)..(901): n is a, c, g, or t
  misc_feature (903)..(903): n is a, c, g, or t
  misc_feature (909)..(909): n is a, c, g, or t
  misc_feature (915)..(915): n is a, c, g, or t
  misc_feature (920)..(922): n is a, c, g, or t
  misc_feature (926)..(926): n is a, c, g, or t
  misc_feature (929)..(929): n is a, c, g, or t
  misc_feature (932)..(935): n is a, c, g, or t
  misc_feature (937)..(937): n is a, c, g, or t
  misc_feature (940)..(940): n is a, c, g, or t
  misc_feature (942)..(942): n is a, c, g, or t
  misc_feature (946)..(947): n is a, c, g, or t
  misc_feature (949)..(949): n is a, c, g, or t
  misc_feature (957)..(957): n is a, c, g, or t
  misc_feature (960)..(960): n is a, c, g, or t
  misc_feature (962)..(962): n is a, c, g, or t
  misc_feature (964)..(964): n is a, c, g, or t
  misc_feature (966)..(967): n is a, c, g, or t
  misc_feature (972)..(973): n is a, c, g, or t
  misc_feature (981)..(983): n is a, c, g, or t
  misc_feature (987)..(987): n is a, c, g, or t
  misc_feature (989)..(990): n is a, c, g, or t
  misc_feature (992)..(993): n is a, c, g, or t
  misc_feature (995)..(995): n is a, c, g, or t
  misc_feature (997)..(998): n is a, c, g, or t
  misc_feature (1001)..(1003): n is a, c, g, or t
  misc_feature (1006)..(1007): n is a, c, g, or t
  misc_feature (1019)..(1019): n is a, c, g, or t
  misc_feature (1030)..(1030): n is a, c, g, or t
  misc_feature (1032)..(1032): n is a, c, g, or t
  misc_feature (1034)..(1036): n is a, c, g, or t
  misc_feature (1044)..(1044): n is a, c, g, or t
  misc_feature (1056)..(1058): n is a, c, g, or t
  misc_feature (1061)..(1061): n is a, c, g, or t
  misc_feature (1064)..(1064): n is a, c, g, or t
  misc_feature (1067)..(1067): n is a, c, g, or t
  misc_feature (1071)..(1071): n is a, c, g, or t
  misc_feature (1075)..(1075): n is a, c, g, or t
  misc_feature (1079)..(1079): n is a, c, g, or t
  misc_feature (1083)..(1083): n is a, c, g, or t
  misc_feature (1086)..(1086): n is a, c, g, or t
  misc_feature (1088)..(1088): n is a, c, g, or t
  misc_feature (1093)..(1093): n is a, c, g, or t
  misc_feature (1096)..(1097): n is a, c, g, or t
  misc_feature (1100)..(1100): n is a, c, g, or t
  misc_feature (1102)..(1102): n is a, c, g, or t
  misc_feature (1104)..(1105): n is a, c, g, or t
  misc_feature (1120)..(1120): n is a, c, g, or t
  misc_feature (1122)..(1122): n is a, c, g, or t
  misc_feature (1130)..(1130): n is a, c, g, or t
  misc_feature (1132)..(1132): n is a, c, g, or t
  misc_feature (1148)..(1148): n is a, c, g, or t
  misc_feature (1151)..(1152): n is a, c, g, or t
  misc_feature (1157)..(1157): n is a, c, g, or t
  misc_feature (1160)..(1160): n is a, c, g, or t
  misc_feature (1162)..(1162): n is a, c, g, or t
  misc_feature (1164)..(1165): n is a, c, g, or t
  misc_feature (1169)..(1174): n is a, c, g, or t
  misc_feature (1176)..(1176): n is a, c, g, or t
  misc_feature (1183)..(1183): n is a, c, g, or t
  misc_feature (1187)..(1187): n is a, c, g, or t
  misc_feature (1191)..(1193): n is a, c, g, or t
  misc_feature (1196)..(1196): n is a, c, g, or t
  misc_feature (1198)..(1198): n is a, c, g, or t
  misc_feature (1200)..(1200): n is a, c, g, or t
  misc_feature (1206)..(1206): n is a, c, g, or t
  misc_feature (1212)..(1215): n is a, c, g, or t
  misc_feature (1218)..(1218): n is a, c, g, or t
  misc_feature (1221)..(1221): n is a, c, g, or t
  misc_feature (1223)..(1224): n is a, c, g, or t
  misc_feature (1226)..(1226): n is a, c, g, or t
  misc_feature (1234)..(1234): n is a, c, g, or t
  misc_feature (1237)..(1238): n is a, c, g, or t
  misc_feature (1241)..(1243): n is a, c, g, or t
  misc_feature (1246)..(1248): n is a, c, g, or t
  misc_feature (1259)..(1259): n is a, c, g, or t
  misc_feature (1268)..(1268): n is a, c, g, or t
  misc_feature (1270)..(1276): n is a, c, g, or t
  misc_feature (1283)..(1284): n is a, c, g, or t
  misc_feature (1287)..(1295): n is a, c, g, or t
  misc_feature (1297)..(1298): n is a, c, g, or t
  misc_feature (1307)..(1307): n is a, c, g, or t
  misc_feature (1309)..(1309): n is a, c, g, or t
  misc_feature (1316)..(1320): n is a, c, g, or t
  misc_feature (1324)..(1324): n is a, c, g, or t
  misc_feature (1326)..(1326): n is a, c, g, or t
  misc_feature (1330)..(1331): n is a, c, g, or t
  misc_feature (1334)..(1334): n is a, c, g, or t
  misc_feature (1338)..(1338): n is a, c, g, or t
  misc_feature (1341)..(1342): n is a, c, g, or t
  misc_feature (1345)..(1346): n is a, c, g, or t
  misc_feature (1356)..(1356): n is a, c, g, or t
  misc_feature (1358)..(1358): n is a, c, g, or t
  misc_feature (1362)..(1365): n is a, c, g, or t
  misc_feature (1368)..(1371): n is a, c, g, or t
  misc_feature (1373)..(1373): n is a, c, g, or t
  misc_feature (1379)..(1379): n is a, c, g, or t
  misc_feature (1385)..(1385): n is a, c, g, or t
ccnantaagaggaaaattaactatggagaggatcgcattcaccactcaccatcacggatcctatttaggtgacacctatanaatcgctcgtacccacgcgttccgcggggttgggagacggancccaggccgggaagcaggcgccgccgccacaggcnaccatggggaacgngtttggctgccanctcgccgcccgcagggtcgccaccgccgcntgcgccggccctcgtggggttgccgccacctccgccctcgccgcnnggcttcacgctgccgccgctgggangnagcctggnngccggcaccagtangagtccanntncgnaangaacccccgnggctgcataccgccagnggcctcaggggcnncccaggatggggcctgnggctgcctgcccaacccgggaanatncnaggagtgccannangaantgnaaggagntgtttcccattcaganggngggtgncaagctcncagncaanaaagggtggagnnaaccaccaanattttttttttttttttttncccccncacccncaangcgggngaangccnanctaaaaaaaaaaaaaaaaacaaatnntggngganaaactcgnntgaatttccnnanannagtncgttcncnttgtactgttggntgacattnnaacgancagtgntcataccacaanntttaaggttcaattacananaacatgggacccccgnnncttnanggtntcagaaaaggnccatcngannacctnantaagtncanaattttngtngaacgngancntgtcgtaccgggantntcccngggnntntnaatntnnccaagctcnccntncncccttgggggaaacccnaaaantnnancnangggttcaannaantctngtnnncccnnntaaactncnaaaaanatcatngctannncttnaancannnnantananaatnnanagtcctanaancngnannacatnnaaaagtannnacananncnnantnnttnnngtnngaaaattttgtntattaaaaaananannnggcaaaanttaaacgtttgnnnaangtnaanattntgcncagnattntanantatantcnntcngnannatgttaaagggtggngntgacattngnacttaattcaattgtnaannataanaantntnnttannnnnnanatttagnccangccnnntantncncatctntttcannnnacncanannanataagagnganngannnccnnnacgagataatnctcctcccntnnnnnnnatatcannccnnnnnnnnntnntatccaacntnaaatacnnnnngttntngacnncanaacntanntcnngccccctctntnttannnntannnnanatcaanccctgng

SEQ ID NO: 204 - DNA, 1405 bp, Homo Sapiens
  misc_feature (1)..(1): n is a, c, g, or t
  misc_feature (7)..(13): n is a, c, g, or t
  misc_feature (917)..(917): n is a, c, g, or t
  misc_feature (933)..(933): n is a, c, g, or t
  misc_feature (945)..(945): n is a, c, g, or t
  misc_feature (948)..(948): n is a, c, g, or t
  misc_feature (953)..(953): n is a, c, g, or t
  misc_feature (967)..(967): n is a, c, g, or t
  misc_feature (972)..(972): n is a, c, g, or t
  misc_feature (984)..(984): n is a, c, g, or t
  misc_feature (997)..(997): n is a, c, g, or t
  misc_feature (1007)..(1007): n is a, c, g, or t
  misc_feature (1011)..(1011): n is a, c, g, or t
  misc_feature (1026)..(1026): n is a, c, g, or t
  misc_feature (1031)..(1031): n is a, c, g, or t
  misc_feature (1042)..(1042): n is a, c, g, or t
  misc_feature (1044)..(1044): n is a, c, g, or t
  misc_feature (1054)..(1054): n is a, c, g, or t
  misc_feature (1059)..(1059): n is a, c, g, or t
  misc_feature (1075)..(1076): n is a, c, g, or t
  misc_feature (1079)..(1079): n is a, c, g, or t
  misc_feature (1084)..(1084): n is a, c, g, or t
  misc_feature (1086)..(1086): n is a, c, g, or t
  misc_feature (1088)..(1088): n is a, c, g, or t
  misc_feature (1099)..(1099): n is a, c, g, or t
  misc_feature (1106)..(1106): n is a, c, g, or t
  misc_feature (1109)..(1109): n is a, c, g, or t
  misc_feature (1124)..(1124): n is a, c, g, or t
  misc_feature (1126)..(1126): n is a, c, g, or t
  misc_feature (1128)..(1128): n is a, c, g, or t
  misc_feature (1132)..(1133): n is a, c, g, or t
  misc_feature (1143)..(1143): n is a, c, g, or t
  misc_feature (1148)..(1148): n is a, c, g, or t
  misc_feature (1152)..(1152): n is a, c, g, or t
  misc_feature (1154)..(1156): n is a, c, g, or t
  misc_feature (1158)..(1159): n is a, c, g, or t
  misc_feature (1167)..(1167): n is a, c, g, or t
  misc_feature (1171)..(1171): n is a, c, g, or t
  misc_feature (1173)..(1173): n is a, c, g, or t
  misc_feature (1182)..(1183): n is a, c, g, or t
  misc_feature (1195)..(1196): n is a, c, g, or t
  misc_feature (1202)..(1202): n is a, c, g, or t
  misc_feature (1217)..(1217): n is a, c, g, or t
  misc_feature (1220)..(1220): n is a, c, g, or t
  misc_feature (1224)..(1224): n is a, c, g, or t
  misc_feature (1226)..(1226): n is a, c, g, or t
  misc_feature (1229)..(1229): n is a, c, g, or t
  misc_feature (1233)..(1233): n is a, c, g, or t
  misc_feature (1236)..(1236): n is a, c, g, or t
  misc_feature (1243)..(1244): n is a, c, g, or t
  misc_feature (1251)..(1251): n is a, c, g, or t
  misc_feature (1255)..(1256): n is a, c, g, or t
  misc_feature (1260)..(1260): n is a, c, g, or t
  misc_feature (1262)..(1262): n is a, c, g, or t
  misc_feature (1267)..(1268): n is a, c, g, or t
  misc_feature (1271)..(1271): n is a, c, g, or t
  misc_feature (1281)..(1281): n is a, c, g, or t
  misc_feature (1287)..(1289): n is a, c, g, or t
  misc_feature (1292)..(1294): n is a, c, g, or t
  misc_feature (1297)..(1301): n is a, c, g, or t
  misc_feature (1303)..(1304): n is a, c, g, or t
  misc_feature (1311)..(1318): n is a, c, g, or t
  misc_feature (1324)..(1324): n is a, c, g, or t
  misc_feature (1334)..(1334): n is a, c, g, or t
  misc_feature (1337)..(1339): n is a, c, g, or t
  misc_feature (1341)..(1342): n is a, c, g, or t
  misc_feature (1349)..(1349): n is a, c, g, or t
  misc_feature (1354)..(1354): n is a, c, g, or t
  misc_feature (1356)..(1357): n is a, c, g, or t
  misc_feature (1361)..(1363): n is a, c, g, or t
  misc_feature (1366)..(1371): n is a, c, g, or t
  misc_feature (1373)..(1380): n is a, c, g, or t
  misc_feature (1382)..(1386): n is a, c, g, or t
  misc_feature (1390)..(1390): n is a, c, g, or t
  misc_feature (1400)..(1403): n is a, c, g, or t
  misc_feature (1405)..(1405): n is a, c, g, or t
ntttccnnnnnnnatttagagatattactatgagaggatcgcatcaccatcaccatcacggatcctatttaggtgacactatagaatcgtcgacccacgcgtccgatgagcgttacaagaatgagtgccgggagaaggaacgtgaggagattgccagacaggcagccaagatggccgatgaagccatcctgcaggaaagagagagaggaggccctgaggagggagtgcgtgggggccaccctccagccatccagagcctcatcaacctgctggcagacaacaggtacctcactgctgaagagactgacaagatcatcaactacctgcgagagcggaaggagcggctgatgaggagcagcaccgactctctgcctggcccgatttcccgccaaccactcggggcgacctcgggtgcctcgctgaagacacagccaagctcccaaccgctccagagcggccaagtgctcccctctgctacacccactccatctgcaccccccacctcccagcaagagcttcaggccaaaatcctcagcctcttcaatagtggcacagtgacggccaatagcagctctgcatccccctcggttgctgccggaaacaccccaaaccagaatttttccacagcagcaaacagccagcctcaacaaagatcacaggcttctggcaatcagcctccaagcattttgggacagggaggatctgctcagaacatgggccccagacctggggctccttcccaagggctttttggccagccttccagtcgcctggcacctgctagcaacatgactagccagaggcctgtgtcttccacaggtatcaactttgacaatccaagtgtacagaaggctctggataccctgatccagagtggccctgctctctcccacctggttagccagaccacagcacanatggggcagccacagnccccatgggatnttnaccanaggcattactgaanctaantctttcaatttnccccagtcccctnttcccctggnctcntcccatttattgttntaaanaaaactggttngnagaatttttntttgngcttcccaggccgggnntcnagtgncntnaatttttaacnactggtnttnttttttgcccaaggntngngttnntttttccttnaaaantttnannngnntttggggncggnanctttttttnntttttggttttnnaaaaanaaattctccgggggnaanaaangngtngggnttntttttanngggtttncccnncccngnttttnnggntttggacccncccccnnnccnnnttnnnnngnnttttttnnnnnnnncccccntttttttttnaannnanngtttttnttttnanntttnnnaannnnnncnnnnnnnncnnnnnaaanaaaaaaaaannnntn

SEQ ID NO: 205 - DNA, 256 bp, Homo Sapiens
ccgccgtcccgcccgccagcgccccagcgaggaagcagcgcgcagcccgcggcccagcgcacccgcagcagcgcccgcagctcgtccgcgccatgttccaggcggccgagcgcccccaggagtgggccatggagggcccccgcgacgggctgaagaaggagcggctactggacgaccgccacgacagcggcctggactccatgaaagacgaggagtacgagcagatggtcaaggagctgcaggagatccgcctcga

SEQ ID NO: 206 - DNA, 256 bp, Homo Sapiens
  misc_feature (2)..(2): n is a, c, g, or t
tnactatgagaggatcgcatcaccatcaccatcacggatcctatttaggtgacactatagaatcgtcgacccacgcgtccgcgaacatggcgaccgcgcgcaccttcgggcccgagcgggaagccgagccggccaaggaagcgcgcgtcgtgggctcggagcttgtggacacttatacggtttacatcatccaggtcactgatggcagccatgagtggacagtaaagcaccgctacagcgacttccatgacctgca

SEQ ID NO: 207 - DNA, 256 bp, Homo Sapiens
  misc_feature (2)..(2): n is a, c, g, or t
  misc_feature (4)..(4): n is a, c, g, or t
tnanaggagaattaactatgagaggatcgcatcaccatcaccatcacggatcctatttaggtgacactatagaatcgtcgacccacgcgtccgcccacgcgtccgcaggctttgaaaagtcaaaagtcaccattaataacaaagtcattttactgaaaaaggagccaccaaaagagaagccagaaaccttaatcaagaagagaaaagctcgttccttgcttcccctgagtacaagcctggaccacagatccaaaga

SEQ ID NO: 208 - DNA, 1290 bp, Homo Sapiens
  misc_feature (818)..(818): n is a, c, g, or t
  misc_feature (852)..(852): n is a, c, g, or t
  misc_feature (893)..(893): n is a, c, g, or t
  misc_feature (907)..(907): n is a, c, g, or t
  misc_feature (918)..(918): n is a, c, g, or t
  misc_feature (920)..(920): n is a, c, g, or t
  misc_feature (926)..(926): n is a, c, g, or t
  misc_feature (956)..(956): n is a, c, g, or t
  misc_feature (965)..(965): n is a, c, g, or t
  misc_feature (989)..(989): n is a, c, g, or t
  misc_feature (1018)..(1018): n is a, c, g, or t
  misc_feature (1023)..(1023): n is a, c, g, or t
  misc_feature (1025)..(1025): n is a, c, g, or t
  misc_feature (1033)..(1033): n is a, c, g, or t
  misc_feature (1045)..(1045): n is a, c, g, or t
  misc_feature (1047)..(1047): n is a, c, g, or t
  misc_feature (1061)..(1061): n is a, c, g, or t
  misc_feature (1063)..(1063): n is a, c, g, or t
  misc_feature (1073)..(1073): n is a, c, g, or t
  misc_feature (1075)..(1075): n is a, c, g, or t
  misc_feature (1080)..(1080): n is a, c, g, or t
  misc_feature (1091)..(1091): n is a, c, g, or t
  misc_feature (1093)..(1093): n is a, c, g, or t
  misc_feature (1097)..(1097): n is a, c, g, or t
  misc_feature (1101)..(1103): n is a, c, g, or t
  misc_feature (1106)..(1109): n is a, c, g, or t
  misc_feature (1111)..(1113): n is a, c, g, or t
  misc_feature (1119)..(1119): n is a, c, g, or t
  misc_feature (1124)..(1124): n is a, c, g, or t
  misc_feature (1127)..(1127): n is a, c, g, or t
  misc_feature (1129)..(1129): n is a, c, g, or t
  misc_feature (1136)..(1136): n is a, c, g, or t
  misc_feature (1140)..(1140): n is a, c, g, or t
  misc_feature (1147)..(1147): n is a, c, g, or t
  misc_feature (1151)..(1152): n is a, c, g, or t
  misc_feature (1155)..(1156): n is a, c, g, or t
  misc_feature (1172)..(1172): n is a, c, g, or t
  misc_feature (1175)..(1175): n is a, c, g, or t
  misc_feature (1179)..(1179): n is a, c, g, or t
  misc_feature (1190)..(1190): n is a, c, g, or t
  misc_feature (1197)..(1200): n is a, c, g, or t
  misc_feature (1207)..(1207): n is a, c, g, or t
  misc_feature (1210)..(1210): n is a, c, g, or t
  misc_feature (1215)..(1215): n is a, c, g, or t
  misc_feature (1219)..(1220): n is a, c, g, or t
  misc_feature (1230)..(1233): n is a, c, g, or t
  misc_feature (1238)..(1239): n is a, c, g, or t
  misc_feature (1247)..(1247): n is a, c, g, or t
  misc_feature (1251)..(1252): n is a, c, g, or t
  misc_feature (1254)..(1256): n is a, c, g, or t
  misc_feature (1260)..(1260): n is a, c, g, or t
  misc_feature (1262)..(1263): n is a, c, g, or t
  misc_feature (1276)..(1278): n is a, c, g, or t
  misc_feature (1287)..(1287): n is a, c, g, or t
tagagaaattactatgagaggatcgcatcaccatcaccatcacggatcctatttaggtgacactatagaatcgtcgacccacgcgtccgcggacgcgtgggcggagccctgccgtgtgggagctggccgaggagtatctggacatcgtgcgggagcacccctgccccctgtcctacgtccgggcccacctcttcaagctgtggcaccacacgctgcaggtgcaccaggagctgcgagaggagctggccaaggtgaagaccctggagggcatcgctgctgtgagccaggagctgaagctgcggtgtcaggaggagatatccaggcaggagggagcgaagcccaccggcgacttgcccttccactggatctgccagccctacatccggccggggcccagggaggggagcaaggagaaggcaggtgcgcgcagcaagcgggccctggaggaagaggagggtggcacggaggtcctgtccaagaacaagcaaaagaagcagctgaggaacccccacaagaccttcgacccctctctgaagccaaaacatgcaaagtgtgaccagtgtggaaacccaaaggtgagtgggttccggctgcaagccaccaaggcttcagctttgggggtgggcagggtggtctctgcactgcttggggtggcaggtctggtgcccgcccagctgggtttgcaacgtggctcaaggtggcatggatgcctcaggacggccccttgcttccagccaagcccctgcccaggcctggaggggaagagagtctgggtgggttggggtgagggagaggcatctggcttgggagcagttccnagggctgcatccaggccgtgggcatctggcaaangcttcccagtggggctgctccctgctggccagcctggcccngggagtggtgctgncacaggctccnanattttntgtgcccagggcaacaaaatgtgtgttcancctgtgccncggctgctgcaaaaaaccaacctnccaaaaaaactgcaaactgcccaggttcncggantngctttttnaaaaccaaattngnaaaaattttttggncntggaaaaaangnccaanccttgaacttnangaancttnnnccnnnnannncctggnaaaancangngggtttncccnaaatttngggnnaanngccttggcctgaaagnccnaaanccccccccccnaaaattnnnnttgaacntgnaaccntctnntttaaaaaannnnttttnnccgggaantccnngnnntttntnngaaaaaaaccccnnnttccccttnccc

SEQ ID NO: 209 - DNA, 256 bp, Homo Sapiens
  misc_feature (6)..(6): n is a, c, g, or t
  misc_feature (8)..(8): n is a, c, g, or t
ctatgnanaggttcgcatcaccatcaccatcacggatcctatttaggtgacactatagaatcgtcgacccacgcgtccgcccacgcgtccgctcatgctggcaacaagctggccatgcaggagttcatgatcctcccagtgggagctgagagctttcgggatgccatgcgactaggtgcagaggtctaccatacactcaagggagtcatcaaggacaaatacggcaaggatgccaccaatgtgggggatgaaggtg

SEQ ID NO: 210 - DNA, 1227 bp, Homo Sapiens
  misc_feature (3)..(9): n is a, c, g, or t
  misc_feature (133)..(133): n is a, c, g, or t
  misc_feature (624)..(624): n is a, c, g, or t
  misc_feature (640)..(640): n is a, c, g, or t
  misc_feature (686)..(686): n is a, c, g, or t
  misc_feature (704)..(704): n is a, c, g, or t
  misc_feature (755)..(755): n is a, c, g, or t
  misc_feature (763)..(763): n is a, c, g, or t
  misc_feature (815)..(815): n is a, c, g, or t
  misc_feature (847)..(847): n is a, c, g, or t
  misc_feature (860)..(860): n is a, c, g, or t
  misc_feature (872)..(872): n is a, c, g, or t
  misc_feature (884)..(884): n is a, c, g, or t
  misc_feature (917)..(917): n is a, c, g, or t
  misc_feature (919)..(919): n is a, c, g, or t
  misc_feature (934)..(934): n is a, c, g, or t
  misc_feature (964)..(964): n is a, c, g, or t
  misc_feature (970)..(970): n is a, c, g, or t
  misc_feature (973)..(973): n is a, c, g, or t
  misc_feature (975)..(975): n is a, c, g, or t
  misc_feature (983)..(983): n is a, c, g, or t
  misc_feature (987)..(987): n is a, c, g, or t
  misc_feature (1011)..(1011): n is a, c, g, or t
  misc_feature (1018)..(1019): n is a, c, g, or t
  misc_feature (1040)..(1040): n is a, c, g, or t
  misc_feature (1057)..(1057): n is a, c, g, or t
  misc_feature (1060)..(1060): n is a, c, g, or t
  misc_feature (1069)..(1069): n is a, c, g, or t
  misc_feature (1085)..(1085): n is a, c, g, or t
  misc_feature (1110)..(1110): n is a, c, g, or t
  misc_feature (1120)..(1121): n is a, c, g, or t
  misc_feature (1125)..(1125): n is a, c, g, or t
  misc_feature (1147)..(1147): n is a, c, g, or t
  misc_feature (1152)..(1152): n is a, c, g, or t
  misc_feature (1157)..(1157): n is a, c, g, or t
  misc_feature (1171)..(1171): n is a, c, g, or t
  misc_feature (1173)..(1173): n is a, c, g, or t
  misc_feature (1177)..(1178): n is a, c, g, or t
  misc_feature (1183)..(1184): n is a, c, g, or t
  misc_feature (1187)..(1187): n is a, c, g, or t
  misc_feature (1194)..(1194): n is a, c, g, or t
  misc_feature (1202)..(1202): n is a, c, g, or t
  misc_feature (1212)..(1212): n is a, c, g, or t
  misc_feature (1215)..(1215): n is a, c, g, or t
  misc_feature (1223)..(1224): n is a, c, g, or t
ttnnnnnnnaattagagaaattactatgagaggatcgcatcaccatcaccatcacggatcctatttaggtgacactatagaatcgtcgacccacgcgttccgatcccggagcgcaagcccctgatgggcgcanaaaattcgggacagaccacgtagaggtgggctcccaagcaggtgcggacggcaccaggccgcccaaggcatcgctgccacctgagctccagccgcccacaaactgctgcatgagtggctgccccaactgcgtgtgggtggagtacgcggacaggctgctgcagcacttccaggacggtggggagcgggccctggctgccctggaggagcacgtggctgatgagaacctcaaggccttcctcaggatggagatccggctgcacaccaggtgcggaggctgagccatccctgctggactccctaccgcaggacggagtccaggacgcagccgcagcctccttccttcacaccccctcacagactccttgtgtccaacgggaataggaagaattagttactgacttcacctgagaaaaaaataaattctctatggtggtttcaaaaaaaaaaaaaaaaaaaaaaaaaaaaaaaaaaaaaaaaaaaaaaaggggnggccgctccctatagngagtcgtattaagcttaattagctgagcttggactcctgttgatanatccagtaatgacctcanaactccatctggatttgttcaaaacgctcggttgccgccgggcgttttttnttggtganaatccaagctagcttggcgagattttcaggagctaaggaagctaaaatgganaaaaaaatcactggatataccaccgttgaatntatcccaatggcntcgtaaaagaanatttttgaggcntttcagtcagttgctcaatgtaacctataaccnanaccgtttcagctggnatattacggccttttttaaaaaccgtaaanaaaaanaancnaagttttntccnggccttttttcaattttttgcccnccctgannaatgctcatccggaattttcntatggcaatgaaaaaanggngaactgggnaatggaaaaatgtttnccctttttaacccgttttcatgaanaaaatgaaanntttnttcccttggaaggaaacccaanaattncgganttttaaaatttttncnaaannggggnnttncggaaanctggcctnttcctaaggnttnttgaaatnnttt

SEQ ID NO: 211 - DNA, 1372 bp, Homo Sapiens
  misc_feature (876)..(876): n is a, c, g, or t
  misc_feature (881)..(881): n is a, c, g, or t
  misc_feature (892)..(892): n is a, c, g, or t
  misc_feature (944)..(944): n is a, c, g, or t
  misc_feature (962)..(962): n is a, c, g, or t
  misc_feature (974)..(974): n is a, c, g, or t
  misc_feature (1010)..(1010): n is a, c, g, or t
  misc_feature (1018)..(1018): n is a, c, g, or t
  misc_feature (1026)..(1026): n is a, c, g, or t
  misc_feature (1028)..(1028): n is a, c, g, or t
  misc_feature (1035)..(1035): n is a, c, g, or t
  misc_feature (1043)..(1043): n is a, c, g, or t
  misc_feature (1047)..(1047): n is a, c, g, or t
  misc_feature (1058)..(1058): n is a, c, g, or t
  misc_feature (1070)..(1070): n is a, c, g, or t
  misc_feature (1079)..(1081): n is a, c, g, or t
  misc_feature (1083)..(1083): n is a, c, g, or t
  misc_feature (1090)..(1090): n is a, c, g, or t
  misc_feature (1102)..(1102): n is a, c, g, or t
  misc_feature (1119)..(1119): n is a, c, g, or t
  misc_feature (1129)..(1129): n is a, c, g, or t
  misc_feature (1142)..(1142): n is a, c, g, or t
  misc_feature (1147)..(1147): n is a, c, g, or t
  misc_feature (1151)..(1151): n is a, c, g, or t
  misc_feature (1153)..(1153): n is a, c, g, or t
  misc_feature (1157)..(1157): n is a, c, g, or t
  misc_feature (1161)..(1161): n is a, c, g, or t
  misc_feature (1167)..(1167): n is a, c, g, or t
  misc_feature (1173)..(1174): n is a, c, g, or t
  misc_feature (1179)..(1179): n is a, c, g, or t
  misc_feature (1181)..(1181): n is a, c, g, or t
  misc_feature (1184)..(1184): n is a, c, g, or t
  misc_feature (1200)..(1200): n is a, c, g, or t
  misc_feature (1203)..(1203): n is a, c, g, or t
  misc_feature (1210)..(1210): n is a, c, g, or t
  misc_feature (1213)..(1213): n is a, c, g, or t
  misc_feature (1215)..(1215): n is a, c, g, or t
  misc_feature (1219)..(1219): n is a, c, g, or t
  misc_feature (1222)..(1222): n is a, c, g, or t
  misc_feature (1224)..(1224): n is a, c, g, or t
  misc_feature (1226)..(1226): n is a, c, g, or t
  misc_feature (1236)..(1237): n is a, c, g, or t
  misc_feature (1240)..(1240): n is a, c, g, or t
  misc_feature (1243)..(1244): n is a, c, g, or t
  misc_feature (1247)..(1248): n is a, c, g, or t
  misc_feature (1250)..(1250): n is a, c, g, or t
  misc_feature (1256)..(1256): n is a, c, g, or t
  misc_feature (1259)..(1259): n is a, c, g, or t
  misc_feature (1264)..(1264): n is a, c, g, or t
  misc_feature (1268)..(1269): n is a, c, g, or t
  misc_feature (1272)..(1272): n is a, c, g, or t
  misc_feature (1274)..(1274): n is a, c, g, or t
  misc_feature (1278)..(1280): n is a, c, g, or t
  misc_feature (1282)..(1282): n is a, c, g, or t
  misc_feature (1288)..(1288): n is a, c, g, or t
  misc_feature (1291)..(1291): n is a, c, g, or t
  misc_feature (1299)..(1299): n is a, c, g, or t
  misc_feature (1302)..(1303): n is a, c, g, or t
  misc_feature (1307)..(1307): n is a, c, g, or t
  misc_feature (1309)..(1309): n is a, c, g, or t
  misc_feature (1311)..(1311): n is a, c, g, or t
  misc_feature (1315)..(1315): n is a, c, g, or t
  misc_feature (1317)..(1317): n is a, c, g, or t
  misc_feature (1320)..(1320): n is a, c, g, or t
  misc_feature (1325)..(1327): n is a, c, g, or t
  misc_feature (1329)..(1332): n is a, c, g, or t
  misc_feature (1336)..(1337): n is a, c, g, or t
  misc_feature (1341)..(1345): n is a, c, g, or t
  misc_feature (1349)..(1358): n is a, c, g, or t
  misc_feature (1360)..(1360): n is a, c, g, or t
  misc_feature (1362)..(1362): n is a, c, g, or t
  misc_feature (1370)..(1370): n is a, c, g, or t
caatagagaaattactatgagaggatcgcatcaccatcaccatcacggatcctatttaggtgacactatagaatcgtcgacccacgcgtccggccccttggagagagaggctgcctcagccagtggcacaggagactccaaggagctactgacattcctaagagtggaggaggaggaggagccttgctgggccagggaaacaaagtttacattgtcctgtagctttaaaaccacagctgggcagggtgagaagctagatgcccctgcagtttggccctggagccagggcagaggaatgtagggcctgcatggagaagggttctgccctgcctgaggaggaggacacagcacaagggcacattgcccatggctgggaacatgacccagcctgaaagatacaggggatcatgttaaaaatagcagtattatttttcgtctcaatggtattgtaactaagttatttactcctcctgctcctcacccctgtagggaaaccttggagaggagagtggcaggtgggctgcctgctgtgttaagaggacttagtttgtgatgtaaggcactgtcaggaatggggggcgggccagggtgggaagagaagaaatagcagagcctattttggtgaggttttttgtttttaagtcaaagaagactcagtatgctttccctgaggaatgaaaaagggattgaggagttgcctgactcctgggtgggtggggtacaggcagttaggtgctgaatgaagctgccatccttgctgcagcttctaactggtaaaaagatccagggatggagatgggaaggttagaaaggcagccctcacctctgaagacagaggccggggtccaggcccgtgggcgcaaaggtgcctcatancatanccagcattcancacacacaaacctactgcccacatttgggcctcagggttggccatttgctanttctgctgccctcttaanatctgactgccnaaataaatcatcctcatgtcaaaaaaaaaaaaaaanggcggccnctccctananggagtcnaattaacntaantaactgaactnggactcctgttnaaaaatccnnnangacctcnaaactcctctgnatttttcaaaccctcgntgcccccggngttttttttgggnaaaanccancnactnggcnaatttncggacnnaggancnaanggaaaaaaatcccggnaanccccctnaantncccnggncncnaaaaaatttnnggnttnnccnntnccaggnccnaaacnaccnnccngnaatnnncntttaanccnaaaaaaanccnntttncncntttncnttnccccnnnannnncccnntttnnnnnaaannnnnnnnnnananttcccctntc

SEQ ID NO: 212 - DNA, 1491 bp, Homo Sapiens
  misc_feature (338)..(338): n is a, c, g, or t
  misc_feature (370)..(370): n is a, c, g, or t
  misc_feature (393)..(393): n is a, c, g, or t
  misc_feature (429)..(429): n is a, c, g, or t
  misc_feature (457)..(457): n is a, c, g, or t
  misc_feature (460)..(460): n is a, c, g, or t
  misc_feature (477)..(477): n is a, c, g, or t
  misc_feature (489)..(491): n is a, c, g, or t
  misc_feature (494)..(495): n is a, c, g, or t
  misc_feature (503)..(503): n is a, c, g, or t
  misc_feature (509)..(509): n is a, c, g, or t
  misc_feature (512)..(513): n is a, c, g, or t
  misc_feature (515)..(516): n is a, c, g, or t
  misc_feature (526)..(526): n is a, c, g, or t
  misc_feature (529)..(529): n is a, c, g, or t
  misc_feature (535)..(535): n is a, c, g, or t
  misc_feature (548)..(548): n is a, c, g, or t
  misc_feature (593)..(593): n is a, c, g, or t
  misc_feature (599)..(599): n is a, c, g, or t
  misc_feature (607)..(607): n is a, c, g, or t
  misc_feature (623)..(623): n is a, c, g, or t
  misc_feature (625)..(625): n is a, c, g, or t
  misc_feature (628)..(628): n is a, c, g, or t
  misc_feature (630)..(632): n is a, c, g, or t
  misc_feature (634)..(634): n is a, c, g, or t
  misc_feature (639)..(639): n is a, c, g, or t
  misc_feature (643)..(643): n is a, c, g, or t
  misc_feature (646)..(646): n is a, c, g, or t
  misc_feature (654)..(654): n is a, c, g, or t
  misc_feature (656)..(656): n is a, c, g, or t
  misc_feature (658)..(658): n is a, c, g, or t
  misc_feature (660)..(660): n is a, c, g, or t
  misc_feature (667)..(667): n is a, c, g, or t
  misc_feature (670)..(670): n is a, c, g, or t
  misc_feature (674)..(675): n is a, c, g, or t
  misc_feature (683)..(683): n is a, c, g, or t
  misc_feature (692)..(692): n is a, c, g, or t
  misc_feature (697)..(697): n is a, c, g, or t
  misc_feature (701)..(701): n is a, c, g, or t
  misc_feature (707)..(707): n is a, c, g, or t
  misc_feature (712)..(712): n is a, c, g, or t
  misc_feature (714)..(714): n is a, c, g, or t
  misc_feature (721)..(721): n is a, c, g, or t
  misc_feature (724)..(724): n is a, c, g, or t
  misc_feature (726)..(726): n is a, c, g, or t
  misc_feature (732)..(732): n is a, c, g, or t
  misc_feature (738)..(738): n is a, c, g, or t
  misc_feature (741)..(741): n is a, c, g, or t
  misc_feature (745)..(746): n is a, c, g, or t
  misc_feature (752)..(752): n is a, c, g, or t
  misc_feature (755)..(755): n is a, c, g, or t
  misc_feature (762)..(762): n is a, c, g, or t
  misc_feature (767)..(767): n is a, c, g, or t
  misc_feature (769)..(769): n is a, c, g, or t
  misc_feature (773)..(773): n is a, c, g, or t
  misc_feature (777)..(777): n is a, c, g, or t
  misc_feature (781)..(782): n is a, c, g, or t
  misc_feature (784)..(786): n is a, c, g, or t
  misc_feature (793)..(793): n is a, c, g, or t
  misc_feature (797)..(798): n is a, c, g, or t
  misc_feature (802)..(802): n is a, c, g, or t
  misc_feature (804)..(804): n is a, c, g, or t
  misc_feature (807)..(808): n is a, c, g, or t
  misc_feature (812)..(812): n is a, c, g, or t
  misc_feature (819)..(820): n is a, c, g, or t
  misc_feature (824)..(825): n is a, c, g, or t
  misc_feature (827)..(827): n is a, c, g, or t
  misc_feature (833)..(833): n is a, c, g, or t
  misc_feature (835)..(835): n is a, c, g, or t
  misc_feature (839)..(840): n is a, c, g, or t
  misc_feature (843)..(844): n is a, c, g, or t
  misc_feature (848)..(848): n is a, c, g, or t
  misc_feature (851)..(851): n is a, c, g, or t
  misc_feature (855)..(858): n is a, c, g, or t
  misc_feature (865)..(865): n is a, c, g, or t
  misc_feature (867)..(867): n is a, c, g, or t
  misc_feature (877)..(879): n is a, c, g, or t
  misc_feature (881)..(881): n is a, c, g, or t
  misc_feature (883)..(883): n is a, c, g, or t
  misc_feature (890)..(894): n is a, c, g, or t
  misc_feature (906)..(906): n is a, c, g, or t
  misc_feature (908)..(909): n is a, c, g, or t
  misc_feature (919)..(919): n is a, c, g, or t
  misc_feature (926)..(926): n is a, c, g, or t
  misc_feature (938)..(938): n is a, c, g, or t
  misc_feature (943)..(943): n is a, c, g, or t
  misc_feature (957)..(957): n is a, c, g, or t
  misc_feature (963)..(965): n is a, c, g, or t
  misc_feature (974)..(974): n is a, c, g, or t
  misc_feature (977)..(977): n is a, c, g, or t
  misc_feature (979)..(980): n is a, c, g, or t
  misc_feature (982)..(982): n is a, c, g, or t
  misc_feature (985)..(986): n is a, c, g, or t
  misc_feature (996)..(996): n is a, c, g, or t
  misc_feature (998)..(999): n is a, c, g, or t
  misc_feature (1006)..(1006): n is a, c, g, or t
  misc_feature (1013)..(1013): n is a, c, g, or t
  misc_feature (1015)..(1015): n is a, c, g, or t
  misc_feature (1022)..(1022): n is a, c, g, or t
  misc_feature (1024)..(1026): n is a, c, g, or t
  misc_feature (1030)..(1030): n is a, c, g, or t
  misc_feature (1032)..(1032): n is a, c, g, or t
  misc_feature (1036)..(1037): n is a, c, g, or t
  misc_feature (1044)..(1044): n is a, c, g, or t
  misc_feature (1047)..(1047): n is a, c, g, or t
  misc_feature (1055)..(1055): n is a, c, g, or t
  misc_feature (1059)..(1059): n is a, c, g, or t
  misc_feature (1067)..(1067): n is a, c, g, or t
  misc_feature (1069)..(1070): n is a, c, g, or t
  misc_feature (1072)..(1072): n is a, c, g, or t
  misc_feature (1075)..(1075): n is a, c, g, or t
  misc_feature (1079)..(1081): n is a, c, g, or t
  misc_feature (1089)..(1089): n is a, c, g, or t
  misc_feature (1092)..(1093): n is a, c, g, or t
  misc_feature (1095)..(1095): n is a, c, g, or t
  misc_feature (1097)..(1098): n is a, c, g, or t
  misc_feature (1100)..(1100): n is a, c, g, or t
  misc_feature (1109)..(1110): n is a, c, g, or t
  misc_feature (1112)..(1112): n is a, c, g, or t
  misc_feature (1115)..(1116): n is a, c, g, or t
  misc_feature (1121)..(1121): n is a, c, g, or t
  misc_feature (1129)..(1130): n is a, c, g, or t
  misc_feature (1132)..(1133): n is a, c, g, or t
  misc_feature (1138)..(1138): n is a, c, g, or t
  misc_feature (1143)..(1143): n is a, c, g, or t
  misc_feature (1146)..(1146): n is a, c, g, or t
  misc_feature (1151)..(1151): n is a, c, g, or t
  misc_feature (1154)..(1155): n is a, c, g, or t
  misc_feature (1158)..(1159): n is a, c, g, or t
  misc_feature (1161)..(1161): n is a, c, g, or t
  misc_feature (1163)..(1163): n is a, c, g, or t
  misc_feature (1170)..(1170): n is a, c, g, or t
  misc_feature (1172)..(1174): n is a, c, g, or t
  misc_feature (1177)..(1177): n is a, c, g, or t
  misc_feature (1180)..(1182): n is a, c, g, or t
  misc_feature (1184)..(1184): n is a, c, g, or t
  misc_feature (1192)..(1192): n is a, c, g, or t
  misc_feature (1195)..(1195): n is a, c, g, or t
  misc_feature (1199)..(1199): n is a, c, g, or t
  misc_feature (1214)..(1214): n is a, c, g, or t
  misc_feature (1223)..(1223): n is a, c, g, or t
  misc_feature (1230)..(1230): n is a, c, g, or t
  misc_feature (1238)..(1238): n is a, c, g, or t
  misc_feature (1246)..(1246): n is a, c, g, or t
  misc_feature (1251)..(1251): n is a, c, g, or t
  misc_feature (1260)..(1260): n is a, c, g, or t
  misc_feature (1265)..(1266): n is a, c, g, or t
  misc_feature (1275)..(1275): n is a, c, g, or t
  misc_feature (1278)..(1278): n is a, c, g, or t
  misc_feature (1286)..(1286): n is a, c, g, or t
  misc_feature (1291)..(1291): n is a, c, g, or t
  misc_feature (1304)..(1304): n is a, c, g, or t
  misc_feature (1310)..(1314): n is a, c, g, or t
  misc_feature (1318)..(1318): n is a, c, g, or t
  misc_feature (1320)..(1320): n is a, c, g, or t
  misc_feature (1323)..(1324): n is a, c, g, or t
  misc_feature (1327)..(1327): n is a, c, g, or t
  misc_feature (1332)..(1333): n is a, c, g, or t
  misc_feature (1335)..(1336): n is a, c, g, or t
  misc_feature (1340)..(1340): n is a, c, g, or t
  misc_feature (1350)..(1350): n is a, c, g, or t
  misc_feature (1358)..(1358): n is a, c, g, or t
  misc_feature (1360)..(1360): n is a, c, g, or t
  misc_feature (1370)..(1370): n is a, c, g, or t
  misc_feature (1372)..(1372): n is a, c, g, or t
  misc_feature (1375)..(1375): n is a, c, g, or t
  misc_feature (1378)..(1378): n is a, c, g, or t
  misc_feature (1381)..(1381): n is a, c, g, or t
  misc_feature (1385)..(1385): n is a, c, g, or t
  misc_feature (1387)..(1388): n is a, c, g, or t
  misc_feature (1390)..(1390): n is a, c, g, or t
  misc_feature (1399)..(1399): n is a, c, g, or t
  misc_feature (1401)..(1403): n is a, c, g, or t
  misc_feature (1416)..(1416): n is a, c, g, or t
  misc_feature (1418)..(1418): n is a, c, g, or t
  misc_feature (1421)..(1421): n is a, c, g, or t
  misc_feature (1435)..(1435): n is a, c, g, or t
  misc_feature (1437)..(1437): n is a, c, g, or t
  misc_feature (1457)..(1457): n is a, c, g, or t
  misc_feature (1460)..(1461): n is a, c, g, or t
  misc_feature (1466)..(1466): n is a, c, g, or t
  misc_feature (1470)..(1472): n is a, c, g, or t
  misc_feature (1475)..(1476): n is a, c, g, or t
  misc_feature (1478)..(1478): n is a, c, g, or t
  misc_feature (1481)..(1481): n is a, c, g, or t
  misc_feature (1485)..(1487): n is a, c, g, or t
  misc_feature (1491)..(1491): n is a, c, g, or t
aaaattagagaaattactatgagaggatcgcatcaccatcaccatcacggatcctatttaggtgacactatagaatcgtcgacccacgcgtccgggagcggagcggcggcgggcgcagctagcgggtcggccgggagcggaggtgcagctcggcttcccccggcacccctccccctcgggcgccagccccacccctccgccggccgggccgaccccgccgtactatcccctgcggcgcgagcccggggcggctccaagcgccccccagcagacccccatcatgggcagccagagctccaaggctccccggggcgacgtgaccgccgaggaggcagcangcgcttcccccgcgaaggccaacggccagganaatggccacgtgaaaagcaatgnagacttatcccccaagggtgaaggggagtcgccccntgtgaacggaacagatgaagcagccggngancactggcgatgccatcnagccagcacccnnntanncagggtgntgaggncanngnngcaggtcctnccnaatganacctcccaagaanaacaaagaaattcttttttcaagaagtcctttcaaaattgagcgncctgtnctttcaanagaattctcgaaggangntgnannntnaattntttntgnttcctctnanananaagtaanaanttannaacaaggntgaaaatcntttgncatntaatanaagangnacactgntcnanaaactnaatgtncanaaanncatacnttnaatagcnaaganantccntatnaaannannnaaaaatntaannttancnaannaaanaaaaatnncaanncntttagntntaannaanntaanatnattnnnnttaagantnaaggaaagannncntntaaatannnnnatcctataattnannatttatttanccttgtnatcatcttagtngtatngaaattcaaatacnatacannnacatttaanatntnntntannacgaatattncnntaaatanttcatcntntttaatnannnttantntaannaaataanagnaaattaanttantatctcantnnanttnattnnnaaattatntcnngntnntntaacttctnntnttnncctanatattttnntnntgttntactntanaatgntgnnaannantntaacttnannntanttnnntnttataganaantaanaataaaaaccgtaanattaacatnatataantatctttnttaaatancttanatagaatanaattnntttatacangtnattacctnacttntaatacttataantttctnnnnntttntnatnnaanttatnntnntacnatattatccnctttaatntntaaacatatnangtnatnatntcantnncnctaatattnannntacatacaatctnancanatcacaacattacntnatatacatttattttgtatnaannctatnatannnaannanatnttannnatan

SEQ ID NO: 213 - DNA, 256 bp, Homo Sapiens
  misc_feature (2)..(2): n is a, c, g, or t
tnaactatgagaggatcgcatcaccatcaccatcacggatcctatttaggtgacactatagaatcgtcgacccacgcgtccgctaagatggcggcgacggccaggcggggctggggagctgcggctgttgccgccgggctgcgcaggcggttctgtcatatgttgaagaatccatacaccattaagaaacagcctctgcatcagtttgtacaaagaccacttttcccactacctgcagccttttatcacccagtga

SEQ ID NO: 214 - DNA, 256 bp, Homo Sapiens
  misc_feature (1)..(2): n is a, c, g, or t
  misc_feature (6)..(6): n is a, c, g, or t
nncctntgagaggatcgcatcaccatcaccatcacggatcctatttaggtgacactatagaatcgtcgacccacgcgtccgattttggggactttgaaaaaagaattcctcgtgaagagatgttacaaatgcaagatattgtactaaatgaagttaaaaaagtggattctgaatacattgctacagtctgtggcagtttcagaagaggtgcagagtccagtggtgacatggatgttctcctgacccatcccagctt

SEQ ID NO: 215 - DNA, 1242 bp, Homo Sapiens
  misc_feature (806)..(806): n is a, c, g, or t
  misc_feature (905)..(905): n is a, c, g, or t
  misc_feature (916)..(916): n is a, c, g, or t
  misc_feature (925)..(925): n is a, c, g, or t
  misc_feature (928)..(929): n is a, c, g, or t
  misc_feature (961)..(961): n is a, c, g, or t
  misc_feature (973)..(973): n is a, c, g, or t
  misc_feature (1005)..(1005): n is a, c, g, or t
  misc_feature (1007)..(1007): n is a, c, g, or t
  misc_feature (1011)..(1011): n is a, c, g, or t
  misc_feature (1014)..(1014): n is a, c, g, or t
  misc_feature (1017)..(1017): n is a, c, g, or t
  misc_feature (1023)..(1023): n is a, c, g, or t
  misc_feature (1037)..(1037): n is a, c, g, or t
  misc_feature (1040)..(1040): n is a, c, g, or t
  misc_feature (1043)..(1043): n is a, c, g, or t
  misc_feature (1047)..(1048): n is a, c, g, or t
  misc_feature (1055)..(1056): n is a, c, g, or t
  misc_feature (1059)..(1059): n is a, c, g, or t
  misc_feature (1087)..(1088): n is a, c, g, or t
  misc_feature (1090)..(1091): n is a, c, g, or t
  misc_feature (1099)..(1099): n is a, c, g, or t
  misc_feature (1102)..(1102): n is a, c, g, or t
  misc_feature (1105)..(1105): n is a, c, g, or t
  misc_feature (1109)..(1109): n is a, c, g, or t
  misc_feature (1113)..(1113): n is a, c, g, or t
  misc_feature (1119)..(1119): n is a, c, g, or t
  misc_feature (1124)..(1124): n is a, c, g, or t
  misc_feature (1140)..(1140): n is a, c, g, or t
  misc_feature (1152)..(1152): n is a, c, g, or t
  misc_feature (1157)..(1157): n is a, c, g, or t
  misc_feature (1159)..(1159): n is a, c, g, or t
  misc_feature (1182)..(1182): n is a, c, g, or t
  misc_feature (1198)..(1198): n is a, c, g, or t
  misc_feature (1201)..(1201): n is a, c, g, or t
  misc_feature (1204)..(1204): n is a, c, g, or t
  misc_feature (1228)..(1228): n is a, c, g, or t
  misc_feature (1231)..(1232): n is a, c, g, or t
  misc_feature (1234)..(1234): n is a, c, g, or t
  misc_feature (1237)..(1237): n is a, c, g, or t
agagaaattactatgagaggatcgcatcaccatcaccatcacggatcctatttaggtgacactatagaatcgtcgacccacgcgtccgcgctccgaggtccccgcgccagagacgcagccgcgctcccaccacccacacccaccgcgccctcgttcgcctcttctccgggagccagtccgcgccaccgccgccgcccaggccatcgccaccctccgcagccatgtccaccaggtccgtgtcctcgtcctcctaccgcaggatgttcggcggcccgggcaccgcgagccggccgagctccagccggagctacgtgactacgtccacccgcacctacagcctgggcagcgcgctgcgccccagcaccagccgcagcctctacgcctcgtccccgggcggcgtgtatgccacgcgctcctctgccgtgcgcctgcggagcagcgtgcccggggtgcggctcctgcaggactcggtggacttctcgctggccgacgccatcaacaccgagttcaagaacacccgcaccaacgagaaggtggagctgcaggagctgaatgaccgcttcgccaactacatcgacaaggtgcgcttcctggagcagcagaataagatcctgctggccgagctcgagcagctcaagggccaaggcaagtcgcgcctgggggacctctacgaggaggagatgcgggagctgcgccggcaggtggaccagctaaccaacgacaaagcccgcgtcgaggtggagcgcgacaacctggccgaggacatcatgcgcctccgggagaaattgcaggaggagatgcttcanagagaggaagccgaaaacaccctgcaatctttcagacaggatgttgacaatgcgtctctggcacgtcttgaccttgaacgcaaagtggaatctttgcanaagagattgcntttttgaanaanntccacgaaaagaaatccaggagctgcaggctnaaattcaggaanagcatgtccaaatcgatgtggatgtttccaancntganctnaanggttgncctgggtgaagtangtnaanaatnngaaagtnnggntgcaaaaaacttgcaggaagcaaaaaanngnnaaaattcnaanttnggtnactntttganggttncaacggaaaaaagaanccttggccaggnaaaanangattccttgaatacgaaaaaggnggagtccctccctggnaangangccttaaagaaaaatgattcttgnaanncnaantggta

SEQ ID NO: 216 - DNA, 1356 bp, Homo Sapiens
  misc_feature (1)..(1): n is a, c, g, or t
  misc_feature (873)..(873): n is a, c, g, or t
  misc_feature (885)..(885): n is a, c, g, or t
  misc_feature (897)..(897): n is a, c, g, or t
  misc_feature (903)..(903): n is a, c, g, or t
  misc_feature (972)..(972): n is a, c, g, or t
  misc_feature (992)..(992): n is a, c, g, or t
  misc_feature (1008)..(1008): n is a, c, g, or t
  misc_feature (1032)..(1032): n is a, c, g, or t
  misc_feature (1035)..(1035): n is a, c, g, or t
  misc_feature (1052)..(1052): n is a, c, g, or t
  misc_feature (1063)..(1063): n is a, c, g, or t
  misc_feature (1066)..(1066): n is a, c, g, or t
  misc_feature (1073)..(1073): n is a, c, g, or t
  misc_feature (1078)..(1078): n is a, c, g, or t
  misc_feature (1089)..(1089): n is a, c, g, or t
  misc_feature (1096)..(1096): n is a, c, g, or t
  misc_feature (1098)..(1098): n is a, c, g, or t
  misc_feature (1100)..(1101): n is a, c, g, or t
  misc_feature (1104)..(1104): n is a, c, g, or t
  misc_feature (1107)..(1107): n is a, c, g, or t
  misc_feature (1128)..(1128): n is a, c, g, or t
  misc_feature (1130)..(1130): n is a, c, g, or t
  misc_feature (1135)..(1135): n is a, c, g, or t
  misc_feature (1140)..(1140): n is a, c, g, or t
  misc_feature (1147)..(1147): n is a, c, g, or t
  misc_feature (1161)..(1161): n is a, c, g, or t
  misc_feature (1165)..(1165): n is a, c, g, or t
  misc_feature (1168)..(1168): n is a, c, g, or t
  misc_feature (1171)..(1171): n is a, c, g, or t
  misc_feature (1173)..(1173): n is a, c, g, or t
  misc_feature (1178)..(1178): n is a, c, g, or t
  misc_feature (1182)..(1182): n is a, c, g, or t
  misc_feature (1191)..(1192): n is a, c, g, or t
  misc_feature (1198)..(1198): n is a, c, g, or t
  misc_feature (1201)..(1202): n is a, c, g, or t
  misc_feature (1212)..(1213): n is a, c, g, or t
  misc_feature (1215)..(1215): n is a, c, g, or t
  misc_feature (1217)..(1217): n is a, c, g, or t
  misc_feature (1219)..(1219): n is a, c, g, or t
  misc_feature (1221)..(1221): n is a, c, g, or t
  misc_feature (1245)..(1245): n is a, c, g, or t
  misc_feature (1252)..(1252): n is a, c, g, or t
  misc_feature (1257)..(1257): n is a, c, g, or t
  misc_feature (1261)..(1262): n is a, c, g, or t
  misc_feature (1264)..(1264): n is a, c, g, or t
  misc_feature (1271)..(1271): n is a, c, g, or t
  misc_feature (1274)..(1274): n is a, c, g, or t
  misc_feature (1278)..(1279): n is a, c, g, or t
  misc_feature (1282)..(1282): n is a, c, g, or t
  misc_feature (1286)..(1286): n is a, c, g, or t
  misc_feature (1299)..(1299): n is a, c, g, or t
  misc_feature (1304)..(1305): n is a, c, g, or t
  misc_feature (1312)..(1313): n is a, c, g, or t
  misc_feature (1323)..(1323): n is a, c, g, or t
  misc_feature (1328)..(1330): n is a, c, g, or t
  misc_feature (1337)..(1337): n is a, c, g, or t
  misc_feature (1341)..(1341): n is a, c, g, or t
  misc_feature (1345)..(1346): n is a, c, g, or t
  misc_feature (1351)..(1351): n is a, c, g, or t
naatagagaaattactatgagaggatcgcatcaccatcaccatcacggatcctatttaggtgacactatagaatcgtcgacccacgcgtccggtgggggtaccgagatctgcgggagcagcggtcccggcttcagttctagcctacccggcagcctggacgggagcaaggcgagaggtgctgccgcctcccgtcgcccctgcgctcagaggtcccgaaccagcccagccgctgcctcttgccgctccgcctttggagtgaggagggcgcagcccgcgtcagaacttagagggccaggcagggtcgcgcgcatggcccgggcgcgcaaccggccccgcccccaggccctctgccaccgccgcgaccaatgaggtttctgacctcctgcagcctcctcttgcctcgggctgcccagatcttggcggctgaggctggcttaccttcgagccgttccttcatgggatttgctgctcccttcaccaacaagcgaaaggcttactcggagcgtagaatcatggggtactcaatgcaggagatgtatgaggtggtgtccaacgtccaggagtatcgtgagtttgtgccctggtgtaagaagtctctggtggtatccagccgtaagggtcatttgaaagcccagctggaggttggctttccacctgtcatggaacgttacacctctgcagtttccatggtcaaacctcacatggtcaaggctgtttgtactgatggcaagctcttcaaccacttagagactatttggcgattcagccctggtattcctgcctatcctcgaacctgcactgtggacttttcgatttcctttgaatttcgttctctgctgcactcccagctggccaccatgttttttgatgangttgtcaaacanaatgttgctgcntttgancgtcgggcagccaccaagtttggtccaaaaaaagccatcccccgtgaactgatgttcatgaggggcacnaaacttgaggcaaggaatgntccctgaactcccttntacccaatttcctaaaaaaattcnctnattaattgggttgggcnccggttccaanttnaaaagantctgngttcaaaaaanggtttcncncnnaanttnccaaaaaattgggttttatgntngctgnaaatnttggggnaaaaaaaaggcaangatntgnaantnaaatntttnaaaaaaggnnaggccnttnnaaaaaaaaanntncngnanctttttaaaaaaaaaaaaaaaaanttgggtnttttngggnntnaaaaaanttntttnnaangggnaaaaaaaattttnaaaannaaaaatnntttttttggnaaaannnggggggnaaantttnnccccnaaatc

SEQ ID NO: 217 - DNA, 1395 bp, Homo Sapiens
  misc_feature (936)..(936): n is a, c, g, or t
  misc_feature (965)..(965): n is a, c, g, or t
  misc_feature (967)..(968): n is a, c, g, or t
  misc_feature (991)..(991): n is a, c, g, or t
  misc_feature (1029)..(1029): n is a, c, g, or t
  misc_feature (1031)..(1031): n is a, c, g, or t
  misc_feature (1034)..(1034): n is a, c, g, or t
  misc_feature (1045)..(1045): n is a, c, g, or t
  misc_feature (1047)..(1047): n is a, c, g, or t
  misc_feature (1049)..(1049): n is a, c, g, or t
  misc_feature (1053)..(1053): n is a, c, g, or t
  misc_feature (1118)..(1118): n is a, c, g, or t
  misc_feature (1120)..(1120): n is a, c, g, or t
  misc_feature (1123)..(1124): n is a, c, g, or t
  misc_feature (1132)..(1132): n is a, c, g, or t
  misc_feature (1134)..(1134): n is a, c, g, or t
  misc_feature (1140)..(1140): n is a, c, g, or t
  misc_feature (1142)..(1142): n is a, c, g, or t
  misc_feature (1149)..(1149): n is a, c, g, or t
  misc_feature (1174)..(1174): n is a, c, g, or t
  misc_feature (1177)..(1178): n is a, c, g, or t
  misc_feature (1181)..(1181): n is a, c, g, or t
  misc_feature (1185)..(1185): n is a, c, g, or t
  misc_feature (1187)..(1187): n is a, c, g, or t
  misc_feature (1190)..(1191): n is a, c, g, or t
  misc_feature (1195)..(1195): n is a, c, g, or t
  misc_feature (1197)..(1197): n is a, c, g, or t
  misc_feature (1199)..(1199): n is a, c, g, or t
  misc_feature (1229)..(1229): n is a, c, g, or t
  misc_feature (1248)..(1248): n is a, c, g, or t
  misc_feature (1251)..(1251): n is a, c, g, or t
  misc_feature (1256)..(1257): n is a, c, g, or t
  misc_feature (1260)..(1260): n is a, c, g, or t
  misc_feature (1263)..(1265): n is a, c, g, or t
  misc_feature (1273)..(1273): n is a, c, g, or t
  misc_feature (1277)..(1277): n is a, c, g, or t
  misc_feature (1279)..(1279): n is a, c, g, or t
  misc_feature (1282)..(1282): n is a, c, g, or t
  misc_feature (1296)..(1296): n is a, c, g, or t
  misc_feature (1300)..(1300): n is a, c, g, or t
  misc_feature (1302)..(1302): n is a, c, g, or t
  misc_feature (1310)..(1310): n is a, c, g, or t
  misc_feature (1328)..(1328): n is a, c, g, or t
  misc_feature (1332)..(1332): n is a, c, g, or t
  misc_feature (1334)..(1334): n is a, c, g, or t
  misc_feature (1336)..(1337): n is a, c, g, or t
  misc_feature (1341)..(1341): n is a, c, g, or t
  misc_feature (1347)..(1348): n is a, c, g, or t
  misc_feature (1351)..(1352): n is a, c, g, or t
  misc_feature (1354)..(1354): n is a, c, g, or t
  misc_feature (1357)..(1361): n is a, c, g, or t
  misc_feature (1367)..(1367): n is a, c, g, or t
  misc_feature (1369)..(1369): n is a, c, g, or t
  misc_feature (1371)..(1371): n is a, c, g, or t
  misc_feature (1379)..(1380): n is a, c, g, or t
  misc_feature (1395)..(1395): n is a, c, g, or t
atagagagattactatgagaggatcgcatcaccatcaccatcacggatcctatttaggtgacactatagaatcgtcgacccacgcgtccgagcgggggaagatggcggcggccgttccacagcgggcgtggaccgtggagcagctgcgcagtgagcagctgcccaagaaggacattatcaagtttctgcaggaacacggttcagattcgtttcttgcagaacataaattattaggaaacattaaaaatgtggccaagacagctaacaaggaccacttggttacagcctataaccatctttttgaaactaagcgttttaagggtactgaaagtataagtaaagtgtctgagcaagtaaaaaatgtgaagcttaatgaagataaacccaaagaaaccaagtctgaagagaccctggatgagggtccaccaaaatatactaaatctgttctgaaaaagggagataaaaccaactttcccaaaaagggagatgttgttcactgctggtatacaggaacactacaagatgggactgtttttgatactaatattcaaacaagtgcaaagaagaagaaaaatgccaagcctttaagttttaaggtcggagtaggcaaagttatcagaggatgggatgaagctctcttgactatgagtaaaggagaaaaggctcgactggagattgaaccagaatgggcttacggaaagaaaggacagcctgatgccaaaattccaccaaatgcaaaactcacttttgaagtggaattagtggatattgattgaaaatagcagtgcttcagctctaaggatattagcaacaatgataaaacttggccttgaagaatttacacaactagttagaacttgttactattgtaagggaagagtcaactggaaaattcaaggagttaataaaatttgtttacttggtccccaccttttngagaaaaaaatcccttatgaatccccggncnnaaatacttttcctacagctgtgntaaatactggtccaggaaaaactttttcccttttaccncntgntggaaaacttnangnggcnccaataaaaattgatccccctgtcttgaaaaaaaaaaaaaaaaaaaaaaaaaaaaaggggggccncnccnnaagggggncnaataancnttaattnacctgacctggaccccggtgaaaanccnnaangccncnaanncccncngnatttttcaaaccccccggttgcccccgggnttttttttggggaaacccnccncttgnnaanttnnnggcctagnaccnanggnaaaaacccgggaancccntnaaatcccnggcccaaaaaatttgggntttncntnnccgnccaaannccnncnggnnnnncctttnancnaaaaaacnnttttccctttttctn

SEQ ID NO: 218 - DNA, 256 bp, Homo Sapiens
  misc_feature (9)..(9): n is a, c, g, or t
  misc_feature (42)..(42): n is a, c, g, or t
  misc_feature (52)..(52): n is a, c, g, or t
  misc_feature (74)..(74): n is a, c, g, or t
tcgagaatntaaaaaattatttgctttgtgagcggatacatntaatagattnattgtgagcggataacaatttncacagaattcattaaagaggagaaattaactatgagaggatcgcatcaccatcaccatcacggatcctatttaggtgacactatagaatcgtcgacccacgcgtccgaaggcattcaggctctggatgaagtcatattttccttggaaacttatgacattacaacagttcgtgcttcagtag

SEQ ID NO: 219 - DNA, 1330 bp, Homo Sapiens
  misc_feature (703)..(703): n is a, c, g, or t
  misc_feature (771)..(771): n is a, c, g, or t
  misc_feature (847)..(847): n is a, c, g, or t
  misc_feature (868)..(868): n is a, c, g, or t
  misc_feature (886)..(886): n is a, c, g, or t
  misc_feature (892)..(892): n is a, c, g, or t
  misc_feature (921)..(921): n is a, c, g, or t
  misc_feature (929)..(929): n is a, c, g, or t
  misc_feature (935)..(935): n is a, c, g, or t
  misc_feature (963)..(963): n is a, c, g, or t
  misc_feature (984)..(984): n is a, c, g, or t
  misc_feature (997)..(997): n is a, c, g, or t
  misc_feature (1006)..(1006): n is a, c, g, or t
  misc_feature (1012)..(1012): n is a, c, g, or t
  misc_feature (1022)..(1022): n is a, c, g, or t
  misc_feature (1027)..(1027): n is a, c, g, or t
  misc_feature (1029)..(1029): n is a, c, g, or t
  misc_feature (1032)..(1032): n is a, c, g, or t
  misc_feature (1048)..(1048): n is a, c, g, or t
  misc_feature (1065)..(1065): n is a, c, g, or t
  misc_feature (1082)..(1082): n is a, c, g, or t
  misc_feature (1092)..(1092): n is a, c, g, or t
  misc_feature (1098)..(1098): n is a, c, g, or t
  misc_feature (1115)..(1115): n is a, c, g, or t
  misc_feature (1123)..(1123): n is a, c, g, or t
  misc_feature (1125)..(1125): n is a, c, g, or t
  misc_feature (1137)..(1137): n is a, c, g, or t
  misc_feature (1141)..(1141): n is a, c, g, or t
  misc_feature (1145)..(1145): n is a, c, g, or t
  misc_feature (1150)..(1150): n is a, c, g, or t
  misc_feature (1160)..(1163): n is a, c, g, or t
  misc_feature (1166)..(1166): n is a, c, g, or t
  misc_feature (1173)..(1173): n is a, c, g, or t
  misc_feature (1175)..(1175): n is a, c, g, or t
  misc_feature (1190)..(1190): n is a, c, g, or t
  misc_feature (1195)..(1195): n is a, c, g, or t
  misc_feature (1198)..(1198): n is a, c, g, or t
  misc_feature (1206)..(1206): n is a, c, g, or t
  misc_feature (1213)..(1214): n is a, c, g, or t
  misc_feature (1223)..(1223): n is a, c, g, or t
  misc_feature (1240)..(1241): n is a, c, g, or t
  misc_feature (1248)..(1248): n is a, c, g, or t
  misc_feature (1250)..(1251): n is a, c, g, or t
  misc_feature (1254)..(1258): n is a, c, g, or t
  misc_feature (1262)..(1263): n is a, c, g, or t
  misc_feature (1265)..(1265): n is a, c, g, or t
  misc_feature (1267)..(1271): n is a, c, g, or t
  misc_feature (1273)..(1273): n is a, c, g, or t
  misc_feature (1277)..(1277): n is a, c, g, or t
  misc_feature (1280)..(1282): n is a, c, g, or t
  misc_feature (1286)..(1288): n is a, c, g, or t
  misc_feature (1292)..(1292): n is a, c, g, or t
  misc_feature (1295)..(1295): n is a, c, g, or t
  misc_feature (1297)..(1297): n is a, c, g, or t
  misc_feature (1300)..(1303): n is a, c, g, or t
  misc_feature (1314)..(1317): n is a, c, g, or t
  misc_feature (1322)..(1322): n is a, c, g, or t
  misc_feature (1329)..(1329): n is a, c, g, or t
tagagaaattactatgagaggatcgcatcaccatcaccatcacggatcctatttaggtgacactatagaatcgtcgacccacgcgtccgcggacgcgtggggcggcgggtgtgggaggtggcgacggccggggccggggtcctgcccggctgcggaggcgggcgcgacgggcgcgggggtcgctgctcctgaggcgatgatgggcaaggaagaggagattgcgcggatcgcccggaggctggacaagatggtgaccaagaagagcgcggagggagccatggatttgctgcgggagctgaaggccatgcctatcacgctgcacctgctccagtccacccgagtcgggatgtctgtcaacgcccttcggaagcagagctcggatgaggaggtcattgcactggccaagtctctcatcaagtcctggaagaagctcctggatgcttccgatgccaaagccagggagcgggggaggggcatgcctctgcccacgtcctcgagggatgcctcagaggccccggatcccagccgcaagaggccggagctgcccagggcaccgtcgactccgaggatcaccacatttcctccggtgcctgtcacctgtgatgccgtgcgcaacaagtgccgcgagatgctgaccgctgccctgcagacggaccatgaccacgtggccatcggtgcggactgcgagcgcctgtcggctcanatcgaggaatgcatcttccgggacgttggaaacacagacatgaagtataagaaccgtgtacggagtcntatctccaacctgaaggatgccaagaaccctgacctgcggcggaatgtgctgtgtggggccataacaccccagcanatcgctgtgatgacctcaaangaaatggccagtgatganctgaangaaatccgtaaggccatgaccaagaaggncatccganagcacnaaatggcccgcactggcggcacgcaaanaacctgttcacttgcggcaantgcagaaaaaaantgcacctancacagntgcaaacccncactntnaanacccatgacccctttnttgtcgcaacaatttgnaacccctgaaatttgcngaccctcggnaaattnctgcaccttgggccttnccggccantnttcgttaaaaantttnttgnaaacntaaaaggggnnnnccngccccancngccgccggaatgacnttttnccnttcccccntaaaaanntttttttcnaaaaaaaaaaaaaaggnnccccccntnnggnnnnnttanntntnnnnnanttgnccnnnaaannnaaanccnanccnnnngtttttaaccnnnnccccnttttttna

SEQ ID NO: 220 - DNA, 1200 bp, Homo Sapiens
  misc_feature (788)..(788): n is a, c, g, or t
  misc_feature (800)..(800): n is a, c, g, or t
  misc_feature (826)..(826): n is a, c, g, or t
  misc_feature (832)..(832): n is a, c, g, or t
  misc_feature (842)..(842): n is a, c, g, or t
  misc_feature (870)..(870): n is a, c, g, or t
  misc_feature (882)..(882): n is a, c, g, or t
  misc_feature (890)..(890): n is a, c, g, or t
  misc_feature (902)..(902): n is a, c, g, or t
  misc_feature (919)..(919): n is a, c, g, or t
  misc_feature (936)..(936): n is a, c, g, or t
  misc_feature (938)..(938): n is a, c, g, or t
  misc_feature (944)..(944): n is a, c, g, or t
  misc_feature (950)..(950): n is a, c, g, or t
  misc_feature (955)..(955): n is a, c, g, or t
  misc_feature (966)..(967): n is a, c, g, or t
  misc_feature (975)..(975): n is a, c, g, or t
  misc_feature (981)..(982): n is a, c, g, or t
  misc_feature (986)..(986): n is a, c, g, or t
  misc_feature (990)..(990): n is a, c, g, or t
  misc_feature (993)..(993): n is a, c, g, or t
  misc_feature (1000)..(1000): n is a, c, g, or t
  misc_feature (1004)..(1005): n is a, c, g, or t
  misc_feature (1010)..(1010): n is a, c, g, or t
  misc_feature (1012)..(1012): n is a, c, g, or t
  misc_feature (1023)..(1023): n is a, c, g, or t
  misc_feature (1033)..(1033): n is a, c, g, or t
  misc_feature (1035)..(1036): n is a, c, g, or t
  misc_feature (1038)..(1040): n is a, c, g, or t
  misc_feature (1044)..(1045): n is a, c, g, or t
  misc_feature (1049)..(1050): n is a, c, g, or t
  misc_feature (1057)..(1058): n is a, c, g, or t
  misc_feature (1062)..(1063): n is a, c, g, or t
  misc_feature (1065)..(1065): n is a, c, g, or t
  misc_feature (1067)..(1069): n is a, c, g, or t
  misc_feature (1071)..(1071): n is a, c, g, or t
  misc_feature (1077)..(1077): n is a, c, g, or t
  misc_feature (1083)..(1087): n is a, c, g, or t
  misc_feature (1090)..(1092): n is a, c, g, or t
  misc_feature (1096)..(1096): n is a, c, g, or t
  misc_feature (1099)..(1099): n is a, c, g, or t
  misc_feature (1101)..(1101): n is a, c, g, or t
  misc_feature (1104)..(1104): n is a, c, g, or t
  misc_feature (1106)..(1107): n is a, c, g, or t
  misc_feature (1114)..(1116): n is a, c, g, or t
  misc_feature (1118)..(1118): n is a, c, g, or t
  misc_feature (1123)..(1127): n is a, c, g, or t
  misc_feature (1130)..(1135): n is a, c, g, or t
  misc_feature (1138)..(1141): n is a, c, g, or t
  misc_feature (1144)..(1146): n is a, c, g, or t
  misc_feature (1150)..(1151): n is a, c, g, or t
  misc_feature (1156)..(1159): n is a, c, g, or t
  misc_feature (1162)..(1163): n is a, c, g, or t
  misc_feature (1166)..(1168): n is a, c, g, or t
  misc_feature (1170)..(1175): n is a, c, g, or t
  misc_feature (1177)..(1181): n is a, c, g, or t
  misc_feature (1183)..(1184): n is a, c, g, or t
  misc_feature (1186)..(1188): n is a, c, g, or t
  misc_feature (1190)..(1193): n is a, c, g, or t
  misc_feature (1195)..(1195): n is a, c, g, or t
  misc_feature (1197)..(1198): n is a, c, g, or t
aatagagagattactatgagaggatcgcatcaccatcaccatcacggatcctatttaggtgacactatagaatcgtcgacccacgcgtccgatcaaccgcaagaagcgcatcccggacacccgcgtccactgctgcctctacttcatccccgccaccggccactccctcaggcccctggacatcgagtttatgaaacgcctgagcaaggtggtcaacatcgtccctgtcatcgccaaggcggacacactcaccctggaggagagggtccacttcaaacagcggatcaccgcagacctgctgtccaacggcatcgacgtgtacccccagaaggaatttgatgaggactcggaggaccggctggtgaacgagaagttccgggagatgatcccatttgctgtggtgggcagtgaccacgagtaccaggtcaacggcaagaggatccttgggaggaagaccaagtggggtaccatcgaagttgaaaacaccacacactgtgagtttgcctacctgcgggaccttctcatcaggacgcacatgcagaacatcaaggacatcaccagcagcatccacttcgaggcgtaccgtgtgaagcgcctcaacgagggcagcagcgccatggccaacggcgtggaggagaaggagccagaagccccggagatgtagacgccgccctgcccacccccgggatcctgcccccaagtcatttccgtcccccccccaggccctcccaccaccccattttattttatatgattttctccatttgtcatcgttccccaccccttcnacatgctgccangaaacaagggaaggggcctccctccnagtgantcatgatgangccgcggcctccccgaggttgtggggangctgcactgganccacaggnaggggtgaaaancacccactgaattgacntgaccctctgtccccangncctggntccccnagggntcaaaaaacannttcggtgngcaatnntccntccntgnggggttntcanngccgnangcctttggggngggggccagncnncnnntttnnaaannaacccanngggnntnannntnccttcntcccannnnnccnnncccntgnantgntnnaaaaccnnngnaaaannnnnccnnnnnnaannnntgnnncccnnccccnnnnggnnggnnntnnnnnncnnnnncnngnnngnnnnangnnaa

SEQ ID NO: 221 - DNA, 256 bp, Homo Sapiens
  misc_feature (2)..(2): n is a, c, g, or t
  misc_feature (4)..(4): n is a, c, g, or t
tnanaggagaattaactatgagaggatcgcatcaccatcaccatcacggatcctatttaggtgacactatagaatcgtcgacccacgcgtccgcccacgcgtccgcccacgcgtccgggccccgccggccactgcccacccaacagcagccacagccatcacagaagttagggcgcatccgtgaagatgagggggcagtggcgtcatcaacagtcaaggagcctcctgaggctacagccacacctgagccactctc

SEQ ID NO: 222 - DNA, 256 bp, Homo Sapiens
ttattaaagaggagaaataacttgagaggatcgcatcaccatcaccatcacggatcctatttaggtgacactatagaatcgtcgacccacgcgtccgcggacgcgtggggggatgaggaggaagagacccacatgaagaagtcagagtcggaggtggaggaggcagcagctattattgcccagcggcctgacaacccaagggagttcttcaagcagcaggaaagagtcgcatcggcctctgcgggcagctgtgatg

SEQ ID NO: 223 - DNA, 256 bp, Homo Sapiens
  misc_feature (246)..(246): n is a, c, g, or t
  misc_feature (249)..(249): n is a, c, g, or t
ttaagaggagaattaactatgagaggatcgcatcaccatcaccatcacggatcctatttaggtgacactatagaatcgtcgacccacgcgtccgggccctccgggaagatggcggccgtgcaggcggccgaggtgaaagtggatggcagcgagccgaaactgagcaagaatgagctgaagagacgcctgaaagctgagaagaaagtagcagagaggaggccaacagaaagagctcagtgagaaaangtnagccaag

SEQ ID NO: 224 - DNA, 256 bp, Homo Sapiens
  misc_feature (1)..(1): n is a, c, g, or t
  misc_feature (4)..(4): n is a, c, g, or t
nacnatgagaggatcgcatcaccatcaccatcacggatcctatttaggtgacactatagaatcgtcgacccacgcgtccgcccacgcgtccgcccacgcgtccggttccttcccctctgagcccgggcttcgccgctctgactctctcttgtccttccgcctggacctcgaccttgggccctcactcctcagcgagctgctaggggtcatgagcctgccagaagcccctgcagctgagactccagcccccgctgca

SEQ ID NO: 225 - DNA, 1182 bp, Homo Sapiens
  misc_feature (942)..(942): n is a, c, g, or t
  misc_feature (951)..(951): n is a, c, g, or t
  misc_feature (956)..(956): n is a, c, g, or t
  misc_feature (976)..(976): n is a, c, g, or t
  misc_feature (981)..(981): n is a, c, g, or t
  misc_feature (1009)..(1009): n is a, c, g, or t
  misc_feature (1049)..(1049): n is a, c, g, or t
  misc_feature (1053)..(1053): n is a, c, g, or t
  misc_feature (1064)..(1064): n is a, c, g, or t
  misc_feature (1066)..(1066): n is a, c, g, or t
  misc_feature (1094)..(1095): n is a, c, g, or t
  misc_feature (1099)..(1099): n is a, c, g, or t
  misc_feature (1101)..(1101): n is a, c, g, or t
  misc_feature (1103)..(1103): n is a, c, g, or t
  misc_feature (1108)..(1108): n is a, c, g, or t
  misc_feature (1116)..(1116): n is a, c, g, or t
  misc_feature (1118)..(1118): n is a, c, g, or t
  misc_feature (1127)..(1127): n is a, c, g, or t
  misc_feature (1129)..(1129): n is a, c, g, or t
  misc_feature (1133)..(1133): n is a, c, g, or t
  misc_feature (1136)..(1136): n is a, c, g, or t
  misc_feature (1141)..(1141): n is a, c, g, or t
  misc_feature (1146)..(1146): n is a, c, g, or t
  misc_feature (1153)..(1153): n is a, c, g, or t
  misc_feature (1156)..(1156): n is a, c, g, or t
  misc_feature (1164)..(1164): n is a, c, g, or t
  misc_feature (1170)..(1170): n is a, c, g, or t
  misc_feature (1172)..(1172): n is a, c, g, or t
  misc_feature (1175)..(1175): n is a, c, g, or t
tatagagaaattactatgagaggatcgcatcaccatcaccatcacggatcctatttaggtgacactatagaatcgtcgacccacgcgtccgctcagtatgatgaggcagtggcacagttcagcaaatctattgaagtcattgagaacagaatggctgtactaaacgagcaggtgaaggaggctgaaggatcgtctgctgaatacaagaaagaaattgaggaactaaaggaactgctacccgaaattagagagaagatagaagatgcaaaggagtctcagcgtagtgggaatgtagctgaactggctctgaaagctactctggtggagagttctacttcaggtttcactcctggtggaggaggctcttcagtctccatgattgccagtagaaagccaacagacggtgcttcctcatcaaattgtgtgactgatatttcccaccttgtcagaaagaagaggaaaccagaggaagagagtccccggaaagatgatgcaaagaaagccaaacaagagccggaggtgaacggaggcagtggggatgctgtccccagtggaaatgaagtttcggaaaacatggaggaggaggctgagaatcaggctgaaagccgggcagcagtggaggggacagtggaggctggagctacagttgaaagcactgcatgttaagagggggcacagccctcctcccaagggaaagtgtttttgtatataatgtattttttcacttttggaggattctttttgtataacttcaataaagattgtaagcaaaggttgaggctttgatggtttttttcttaattattggctgaatctgccttggagcactgctggttttatatattagccaaaggttttgttctggccttctgtactgatctgtgttcctgatcctaattcctatctgtctacgtggaggtgatcaagtgtggctgtaggccnttgtttccnatggngctatattctgttttcaacncttcnctgaacccagctgtcttgcaactttcantggggctgtccctggatggggcctacaaaacaaaattggngaanatcttgcctcngngctgaaatggatgatggactttggctgnnaccngncnaaganggtcttgncnttttccccnancctnccnggggncttanttttgcntgnaaaaaacntgaaancnggntcgggaa

SEQ ID NO: 226 - DNA, 1373 bp, Homo Sapiens
  misc_feature (599)..(599): n is a, c, g, or t
  misc_feature (804)..(804): n is a, c, g, or t
  misc_feature (818)..(818): n is a, c, g, or t
  misc_feature (833)..(833): n is a, c, g, or t
  misc_feature (855)..(855): n is a, c, g, or t
  misc_feature (869)..(869): n is a, c, g, or t
  misc_feature (930)..(930): n is a, c, g, or t
  misc_feature (932)..(932): n is a, c, g, or t
  misc_feature (950)..(951): n is a, c, g, or t
  misc_feature (957)..(958): n is a, c, g, or t
  misc_feature (970)..(971): n is a, c, g, or t
  misc_feature (978)..(978): n is a, c, g, or t
  misc_feature (982)..(982): n is a, c, g, or t
  misc_feature (987)..(987): n is a, c, g, or t
  misc_feature (991)..(991): n is a, c, g, or t
  misc_feature (1008)..(1008): n is a, c, g, or t
  misc_feature (1012)..(1012): n is a, c, g, or t
  misc_feature (1014)..(1014): n is a, c, g, or t
  misc_feature (1024)..(1024): n is a, c, g, or t
  misc_feature (1026)..(1026): n is a, c, g, or t
  misc_feature (1029)..(1029): n is a, c, g, or t
  misc_feature (1031)..(1031): n is a, c, g, or t
  misc_feature (1039)..(1039): n is a, c, g, or t
  misc_feature (1042)..(1042): n is a, c, g, or t
  misc_feature (1050)..(1050): n is a, c, g, or t
  misc_feature (1064)..(1064): n is a, c, g, or t
  misc_feature (1067)..(1067): n is a, c, g, or t
  misc_feature (1071)..(1071): n is a, c, g, or t
  misc_feature (1074)..(1074): n is a, c, g, or t
  misc_feature (1077)..(1077): n is a, c, g, or t
  misc_feature (1084)..(1085): n is a, c, g, or t
  misc_feature (1090)..(1090): n is a, c, g, or t
  misc_feature (1097)..(1097): n is a, c, g, or t
  misc_feature (1099)..(1100): n is a, c, g, or t
  misc_feature (1109)..(1109): n is a, c, g, or t
  misc_feature (1112)..(1113): n is a, c, g, or t
  misc_feature (1117)..(1118): n is a, c, g, or t
  misc_feature (1131)..(1131): n is a, c, g, or t
  misc_feature (1141)..(1141): n is a, c, g, or t
  misc_feature (1150)..(1150): n is a, c, g, or t
  misc_feature (1155)..(1155): n is a, c, g, or t
  misc_feature (1157)..(1158): n is a, c, g, or t
  misc_feature (1164)..(1164): n is a, c, g, or t
  misc_feature (1173)..(1173): n is a, c, g, or t
  misc_feature (1182)..(1182): n is a, c, g, or t
  misc_feature (1190)..(1190): n is a, c, g, or t
  misc_feature (1197)..(1197): n is a, c, g, or t
  misc_feature (1205)..(1205): n is a, c, g, or t
  misc_feature (1210)..(1210): n is a, c, g, or t
  misc_feature (1225)..(1225): n is a, c, g, or t
  misc_feature (1227)..(1227): n is a, c, g, or t
  misc_feature (1231)..(1231): n is a, c, g, or t
  misc_feature (1234)..(1234): n is a, c, g, or t
  misc_feature (1243)..(1243): n is a, c, g, or t
  misc_feature (1249)..(1249): n is a, c, g, or t
  misc_feature (1251)..(1251): n is a, c, g, or t
  misc_feature (1257)..(1257): n is a, c, g, or t
  misc_feature (1260)..(1260): n is a, c, g, or t
  misc_feature (1262)..(1262): n is a, c, g, or t
  misc_feature (1267)..(1267): n is a, c, g, or t
  misc_feature (1270)..(1271): n is a, c, g, or t
  misc_feature (1277)..(1279): n is a, c, g, or t
  misc_feature (1281)..(1282): n is a, c, g, or t
  misc_feature (1291)..(1291): n is a, c, g, or t
  misc_feature (1294)..(1294): n is a, c, g, or t
  misc_feature (1302)..(1302): n is a, c, g, or t
  misc_feature (1306)..(1306): n is a, c, g, or t
  misc_feature (1311)..(1311): n is a, c, g, or t
  misc_feature (1314)..(1314): n is a, c, g, or t
  misc_feature (1324)..(1324): n is a, c, g, or t
  misc_feature (1326)..(1327): n is a, c, g, or t
  misc_feature (1329)..(1329): n is a, c, g, or t
  misc_feature (1332)..(1332): n is a, c, g, or t
  misc_feature (1336)..(1336): n is a, c, g, or t
  misc_feature (1340)..(1342): n is a, c, g, or t
  misc_feature (1361)..(1362): n is a, c, g, or t
  misc_feature (1367)..(1368): n is a, c, g, or t
  misc_feature (1372)..(1372): n is a, c, g, or t
aaattagagaaaattactatgagaggatcgcatcaccatcaccatcacggatcctatttaggtgacactatagaatcgtcgacccacgcgtccgccgcgatcagaccgctctgtgccgcgagccgccgtgagcactcggattcaagccggcgccaacgagtccgggggcatcgcccgcagcggccaagctcatggccggctgagcgggacgccgcctccgcctcagccaccgccgccgccgccgcctcctcctcctcagccggcggcggcccgggcccagcaaccatggctgaagactactgggacgggcgcctgcggcgaacaggaggagaaggaggtcgcgcggcctcatcccgggccgccgccccaggcgccgccgcgccggccccgcggctctgaggttgctcgcgcgcccccgccgtcactattccaggtcctcaggatatagccgtgacctaaacacagaaatctaccctggcggagctgatcttctagttgtggcgatcgccatggatcggatgaagaagatcaaacggcagctgtcaatgacactccgaggtggccgaggcatagacaagaccaatggtgcccctgagcanataggcctggatgagagtggtggtggtggcggcagtgaccctggagaggcccccacacgtgctgctcctggggaacttcgttctgcacggggcccactcagctctgcaccagagattgtgcacgaggacttgaagatggggtctgatggggagagtgaccaggcttcagccacgtcctcggatgaagtgcagtctccagtgagantgcgtatgcgcaancatcccccacgccanatcttcactgaagacattcaanaaagcgcctatcantaccagctgaaaattccggcttgcttgaagggcttacttggaaaaacctgaaccctcaatnancccccaatttttgaaaanncccctnnagccgccgcctnngtcgggntaancctantttnaaaattggcttttgggnaaantnggaaaacttnanttnancttggaanaanctggggcnagggttaacttatnccncccntcntanaaaaagnnaaaancaaattntnnaaaaaaacnttnnggcnntttaaggaaattnaaatggaaantttaaaaanggggncnncttgcnccccccttncggaaaatntttccttntttaaangaactttnaaaangccaaaaattttttncnttantanaattttttncaaccngnaaaatntcntnccccnttnnttttgnnnannggaaaaaanacnttaaaaanatanttganttntggggaaaantnntnatnttcnaaannntaaaatttttttttttatnntcttnngggnt

SEQ ID NO: 227 - DNA, 1267 bp, Homo Sapiens
  misc_feature (1)..(1): n is a, c, g, or t
  misc_feature (902)..(902): n is a, c, g, or t
  misc_feature (910)..(910): n is a, c, g, or t
  misc_feature (924)..(924): n is a, c, g, or t
  misc_feature (938)..(938): n is a, c, g, or t
  misc_feature (941)..(941): n is a, c, g, or t
  misc_feature (947)..(948): n is a, c, g, or t
  misc_feature (965)..(965): n is a, c, g, or t
  misc_feature (967)..(967): n is a, c, g, or t
  misc_feature (985)..(985): n is a, c, g, or t
  misc_feature (1016)..(1016): n is a, c, g, or t
  misc_feature (1028)..(1028): n is a, c, g, or t
  misc_feature (1044)..(1044): n is a, c, g, or t
  misc_feature (1052)..(1052): n is a, c, g, or t
  misc_feature (1055)..(1055): n is a, c, g, or t
  misc_feature (1065)..(1065): n is a, c, g, or t
  misc_feature (1073)..(1073): n is a, c, g, or t
  misc_feature (1090)..(1090): n is a, c, g, or t
  misc_feature (1096)..(1096): n is a, c, g, or t
  misc_feature (1099)..(1099): n is a, c, g, or t
  misc_feature (1109)..(1109): n is a, c, g, or t
  misc_feature (1142)..(1142): n is a, c, g, or t
  misc_feature (1151)..(1151): n is a, c, g, or t
  misc_feature (1156)..(1157): n is a, c, g, or t
  misc_feature (1183)..(1183): n is a, c, g, or t
  misc_feature (1194)..(1196): n is a, c, g, or t
  misc_feature (1198)..(1198): n is a, c, g, or t
  misc_feature (1241)..(1243): n is a, c, g, or t
  misc_feature (1257)..(1257): n is a, c, g, or t
  misc_feature (1262)..(1262): n is a, c, g, or t
  misc_feature (1264)..(1264): n is a, c, g, or t
naattagagaaattactatgagaggatcgcatcaccatcaccatcacggatcctatttaggtgacactatagaatcgtcgacccacgcgtccgaggaggacggcgagagcacggacagactcatggggaagggccaggtccagctggacccgcaggccctgcaggacagagactggcagcgcaccgtcatcgccatgaatgggatcgaagtaaagctctcggtcaagttcaacagcagggagttcagcttgaagaggatgccgtcccgaaaacagacaggggtcttcggagtcaagattgctgtggtcaccaagagagagaggtccaaggtgccctacatcgtgcgccagtgcgtggaggagatcgagcgccgaggcatggaggaggtgggcatctaccgcgtgtccggtgtggccacggacatccaggcactgaaggcagccttcgacgtcaataacaaggacgtgtcggtgatgatgagcgagatggacgtgaacgccatcgcaggcacgctgaagctgtacttccgtgagctgcccgagcccctcttcactgacgagttctaccccaacttcgcagagggcatcgctctttcagacccggttgcaaaggagagctgcatgctcaacctgctgctgtccctgccggaggccaacctgctcaccttccttttccttctggaccacctgaaaagggtggcagagaaggaggcagtcaataagatgtccctgcacaacctcgccacggtctttggccccacgctgctccggccctccgagaaggagagcaagctccctgccaaccccagccagcctatcaccatgactgacagctggtccttggaggtcatgtcccaggtccaggtgctgctgtacttcctgcagctggaaggccatccctgnccccgganagcaaaaaacagancatcctgttctccnccngaaatnntaaaggtccccagtccntntcctggaaggcggaaaanatggcctgaaaacttctggctaatcgggccntccgtaaaacgnaaacctttctgaggtntccttggnccncccccagttnttgggccntttgccaaaaaaacccncccaanccnaaagaaaggnggcctgaaaaatccccccaggtttggaaacccnggctggccnaaatnngttttttttggcccctgagggccccnaccattttttnnnantcaacctggccttggaaaaggggaaagagggttttttaaattnnnttaatcaaaaattncctgntnctg

SEQ ID NO: 228 - DNA, 256 bp, Homo Sapiens
  misc_feature (4)..(5): n is a, c, g, or t
  misc_feature (7)..(18): n is a, c, g, or t
  misc_feature (20)..(20): n is a, c, g, or t
  misc_feature (22)..(22): n is a, c, g, or t
  misc_feature (26)..(27): n is a, c, g, or t
  misc_feature (37)..(37): n is a, c, g, or t
  misc_feature (39)..(39): n is a, c, g, or t
  misc_feature (41)..(41): n is a, c, g, or t
  misc_feature (44)..(47): n is a, c, g, or t
  misc_feature (56)..(56): n is a, c, g, or t
  misc_feature (60)..(60): n is a, c, g, or t
  misc_feature (65)..(65): n is a, c, g, or t
  misc_feature (68)..(68): n is a, c, g, or t
  misc_feature (72)..(72): n is a, c, g, or t
  misc_feature (77)..(77): n is a, c, g, or t
  misc_feature (86)..(86): n is a, c, g, or t
  misc_feature (89)..(89): n is a, c, g, or t
  misc_feature (95)..(97): n is a, c, g, or t
  misc_feature (99)..(100): n is a, c, g, or t
  misc_feature (102)..(102): n is a, c, g, or t
  misc_feature (104)..(105): n is a, c, g, or t
  misc_feature (107)..(110): n is a, c, g, or t
  misc_feature (114)..(114): n is a, c, g, or t
  misc_feature (117)..(117): n is a, c, g, or t
  misc_feature (120)..(120): n is a, c, g, or t
  misc_feature (122)..(123): n is a, c, g, or t
  misc_feature (126)..(126): n is a, c, g, or t
  misc_feature (130)..(130): n is a, c, g, or t
  misc_feature (143)..(144): n is a, c, g, or t
  misc_feature (148)..(148): n is a, c, g, or t
  misc_feature (150)..(151): n is a, c, g, or t
  misc_feature (154)..(156): n is a, c, g, or t
  misc_feature (166)..(166): n is a, c, g, or t
  misc_feature (168)..(168): n is a, c, g, or t
  misc_feature (172)..(174): n is a, c, g, or t
  misc_feature (178)..(178): n is a, c, g, or t
  misc_feature (180)..(182): n is a, c, g, or t
  misc_feature (192)..(192): n is a, c, g, or t
  misc_feature (195)..(195): n is a, c, g, or t
  misc_feature (197)..(197): n is a, c, g, or t
  misc_feature (201)..(202): n is a, c, g, or t
  misc_feature (204)..(204): n is a, c, g, or t
  misc_feature (207)..(207): n is a, c, g, or t
  misc_feature (214)..(214): n is a, c, g, or t
  misc_feature (218)..(218): n is a, c, g, or t
  misc_feature (220)..(220): n is a, c, g, or t
  misc_feature (227)..(230): n is a, c, g, or t
  misc_feature (233)..(233): n is a, c, g, or t
  misc_feature (237)..(238): n is a, c, g, or t
  misc_feature (241)..(241): n is a, c, g, or t
  misc_feature (246)..(247): n is a, c, g, or t
  misc_feature (249)..(249): n is a, c, g, or t
  misc_feature (252)..(252): n is a, c, g, or t
  misc_feature (256)..(256): n is a, c, g, or t
attnnannnnnnnnnnnntnanatannattattccgnantnccnnnngaggggganttanctatnagnaggncgccntcaccatcnccntcactnnntnntnanntnnnnggcnaanaanannaanattntaaccacccccgnncggncnngcnnnattgtagatngntaannnctgngnnngtataagaantcngntaanncngtntttccangtangngagttgnnnntgngttnntcnatagnntnggncttn

SEQ ID NO: 229 - DNA, 256 bp, Homo Sapiens
tagagaaatactatgagaggatcgcatcaccatcaccatcacggatcctatttaggtgacactatagaatcgtcgacccacgcgtccggttctcttgtcctcgtagttcggcaagacccattgcttgggagcagcgagactttcaacagtttcctgcgtcgggcacaacaggagacacagcaggtccccacagaggaagtgtccttggaagtgctgctcagcaacgggcagaaagttctggtcaacgtgctaactt

SEQ ID NO: 230 - DNA, 256 bp, Homo Sapiens
  misc_feature (3)..(4): n is a, c, g, or t
ttnnctatgagaggatcgcatcaccatcaccatcacggatcctatttaggtgacactatagaatcgtcgacccacgcgtccggggcggtgctggtttttcgctcgtcgactgcggctcttcctcgggcagcggaagcggcgcggcggtcggagaagtggcctaaaacttcggcgttgggtgaaagaaaatggcccgaaccaagcagactgctcgtaagtccaccggtgggaaagccccccgcaaacagctggccac

SEQ ID NO: 231 - DNA, 256 bp, Homo Sapiens
ttattaaagaggagaaataactatgagaggatcgcatcaccatcaccatcacggatcctatttaggtgacactatagaatcgtcgacccacgcgtccgcccacgcgtccgcgcgccagtcccgagcagtgctcgctcctgctcggggcgctgcggccccgggcgtcgccatgaccagtgagctggacatcttcgtggggaacacgacccttatcgacgaggacgtgtatcgcctctggctcgatggttactcggtg

SEQ ID NO: 232 - DNA, 1200 bp, Homo Sapiens
  misc_feature (813)..(813): n is a, c, g, or t
  misc_feature (823)..(823): n is a, c, g, or t
  misc_feature (847)..(847): n is a, c, g, or t
  misc_feature (855)..(855): n is a, c, g, or t
  misc_feature (873)..(873): n is a, c, g, or t
  misc_feature (880)..(880): n is a, c, g, or t
  misc_feature (885)..(885): n is a, c, g, or t
  misc_feature (905)..(905): n is a, c, g, or t
  misc_feature (928)..(928): n is a, c, g, or t
  misc_feature (939)..(940): n is a, c, g, or t
  misc_feature (971)..(972): n is a, c, g, or t
  misc_feature (987)..(987): n is a, c, g, or t
  misc_feature (994)..(994): n is a, c, g, or t
  misc_feature (1006)..(1007): n is a, c, g, or t
  misc_feature (1020)..(1020): n is a, c, g, or t
  misc_feature (1041)..(1041): n is a, c, g, or t
  misc_feature (1047)..(1048): n is a, c, g, or t
  misc_feature (1056)..(1056): n is a, c, g, or t
  misc_feature (1083)..(1084): n is a, c, g, or t
  misc_feature (1088)..(1088): n is a, c, g, or t
  misc_feature (1101)..(1101): n is a, c, g, or t
  misc_feature (1104)..(1104): n is a, c, g, or t
  misc_feature (1112)..(1112): n is a, c, g, or t
  misc_feature (1118)..(1118): n is a, c, g, or t
  misc_feature (1121)..(1121): n is a, c, g, or t
  misc_feature (1139)..(1140): n is a, c, g, or t
  misc_feature (1150)..(1150): n is a, c, g, or t
  misc_feature (1159)..(1159): n is a, c, g, or t
  misc_feature (1172)..(1173): n is a, c, g, or t
  misc_feature (1176)..(1176): n is a, c, g, or t
  misc_feature (1178)..(1178): n is a, c, g, or t
aatagagaaattactatgagaggatcgcatcaccatcaccatcacggatcctatttaggtgacactatagaatcgtcgacccacgcgtccgggaagtcagaggggcatggcgaggagtccagctctgaggactctgacattgatggcgaggcggaggacggggagcagggccccatctggacgttcccccctaccatccggccgagtccacacagcaagcttcacaaggggacggccctgcacagttcacagaagcctgcggagcccgtcaagaggcagccgaggtcccagtgcctgtccacgctggtccggcccgtcttcggagagctcaaagagaagcacaagcagagcggcgggagcgtgggtgcgctggaggagctggagaacgccttcagcctggccgaggagtcctgccccggcatctcagacaagctgatggtgcacctggtggagcgagtgcagaggttttcacacaacagaaaccacctgacatccacccgctgaagcgcactgctgttcagataggggacggaaggtcgtttgtttttgttctgagctccataagaactgtgctgacttggaaggtgccctgtgctatgtcgtgcctgcagggacacgtcggatcccgtgggcctcacatgccaggtcaccaggtcaccgtctccttccacccctgcagtgtgctgttgtgcacgtcagggacgctgttctctatgcccactgccctcctccctctcctggcccagcagtattgctcacgggggctccagccgccggcgtggccctcatgagctacgcctgggtcttctgcanactcatgcancccctatggccgctcaaaaccaangcgcaaancaactatcagggcagctnttgcctncctcntcccatgaaggtgggggaanaggcaacaggggccaaccccccnaaagaattgtnntggcccgcttgttccttcccggggcccatgnntggccataaaatttncccttgngggtgtttgganncagggtacttggnttttgcccaaaaaatactttngttcannccaaaatntttttttttttttaaaaaaattaaatnntttnttttccttaaaanttntgaaggtnaaatgnttnatttttttaaaaaaattnnaaagcccctngcccctttnaaaaaaaacctgnnttngnaaaaaaaaaaaaaagggggccc

SEQ ID NO: 233 - DNA, 256 bp, Homo Sapiens
tgtgccccaagaacgtgacagatgagcaggagggcttcgccgagggcttcgtgcgcgccctggccgaactgcacagccagaacacgctgcccagcgtcacgtcggcggcgcagccggtcaacggggcaggcatggtggctcccgcggtagcctcggtggcagggggcagcggcagcggccggcctggcctttcccgcgcaaccccagcagcagcagcagccgccgcaccacctgccccagcagatgcccgtgcagc

SEQ ID NO: 234 - DNA, 256 bp, Homo Sapiens
taagagaaattaactatgagaggatcgcatcaccatcaccatcacggatcctatttaggtgacactatagaatcgtcgacccacgcgtccgcctccctgcatggtatttcccaggtggtgaaggaccacgtgaccaagcctaccgccatggcccagggccgagtggctcacctcattgagtggaagggctggagcaagccgagtgactcacctgctgccctggaatcagccttttcctcctattcagacctcagcg

SEQ ID NO: 235 - DNA, 1200 bp, Homo Sapiens
  misc_feature (749)..(749): n is a, c, g, or t
  misc_feature (815)..(815): n is a, c, g, or t
  misc_feature (827)..(827): n is a, c, g, or t
  misc_feature (870)..(870): n is a, c, g, or t
  misc_feature (873)..(873): n is a, c, g, or t
  misc_feature (880)..(908): n is a, c, g, or t
  misc_feature (915)..(915): n is a, c, g, or t
  misc_feature (927)..(927): n is a, c, g, or t
  misc_feature (934)..(934): n is a, c, g, or t
  misc_feature (938)..(938): n is a, c, g, or t
  misc_feature (944)..(944): n is a, c, g, or t
  misc_feature (946)..(946): n is a, c, g, or t
  misc_feature (951)..(951): n is a, c, g, or t
  misc_feature (953)..(953): n is a, c, g, or t
  misc_feature (976)..(976): n is a, c, g, or t
  misc_feature (993)..(993): n is a, c, g, or t
  misc_feature (1001)..(1001): n is a, c, g, or t
  misc_feature (1010)..(1010): n is a, c, g, or t
  misc_feature (1030)..(1030): n is a, c, g, or t
  misc_feature (1034)..(1034): n is a, c, g, or t
  misc_feature (1051)..(1051): n is a, c, g, or t
  misc_feature (1064)..(1064): n is a, c, g, or t
  misc_feature (1070)..(1071): n is a, c, g, or t
  misc_feature (1075)..(1076): n is a, c, g, or t
  misc_feature (1080)..(1081): n is a, c, g, or t
  misc_feature (1087)..(1088): n is a, c, g, or t
  misc_feature (1096)..(1097): n is a, c, g, or t
  misc_feature (1102)..(1102): n is a, c, g, or t
  misc_feature (1105)..(1105): n is a, c, g, or t
  misc_feature (1107)..(1107): n is a, c, g, or t
  misc_feature (1112)..(1113): n is a, c, g, or t
  misc_feature (1119)..(1119): n is a, c, g, or t
  misc_feature (1122)..(1122): n is a, c, g, or t
  misc_feature (1132)..(1132): n is a, c, g, or t
  misc_feature (1136)..(1136): n is a, c, g, or t
  misc_feature (1139)..(1139): n is a, c, g, or t
  misc_feature (1143)..(1143): n is a, c, g, or t
  misc_feature (1150)..(1151): n is a, c, g, or t
  misc_feature (1154)..(1154): n is a, c, g, or t
  misc_feature (1166)..(1166): n is a, c, g, or t
  misc_feature (1170)..(1172): n is a, c, g, or t
  misc_feature (1175)..(1175): n is a, c, g, or t
  misc_feature (1190)..(1190): n is a, c, g, or t
  misc_feature (1194)..(1195): n is a, c, g, or t
agaaattactatgagaggatcgcatcaccatcaccatcacggatcctatttaggtgacactatagaatcgtcgacccacgcgtccgccctgctcaggctgcccaagaagcgtggaaccttcatcgagttctccgaactggacaagaaagagaagatccgggagaagttcgtggaagccctgaaaacagagtttgctggcaaagggctgaggttctctcgaggaggcatgatcagctttgacgtcttccccgagggctgggacaagcgctactgcctggatagcctggaccaggacagcttcgacaccatccacttctttgggaacgagactagccctggtgggaacgactttgagatctttgccgacccccggactgttggccacagcgtggtgtctcctcaggacacggtgcagcgatgccgggagattttcttcccagagacagctcatgaggcgtgaccggggcccacatctgtgtgtcgtgacttctgaagagtttggcctaggcctaaagagaggtcctggtgttggatagatgccagggcccctcctctggcccaggacgcctgctgcaagcccacccagatggggccagagtctgtgtggacaaccgtccccagccagtctgctcctagtggcactggcttcgtcctcccagggcccagagtgttccccatgctccacctggtggcccaggccacagctgctgcttgtatttcggtacagaagaggtttctttctgcaccangaggaggcgtgctcaagtatcggtacgagatctagcctgccctgcctgcctgccctgggcgatgangtacggtggggnaaggtgcctattttaaagaactttgtcacagtattaaaagttnccnagaaccnnnnnnnnnnnnnnnnnnnnnnnnnnnnngggcggncccctcccctanaagggantcgnattaancnttaantnaacttgaacttggaacctcctgnttgaaaaatccagtaangacccccnaaaactccntctggaatttttttcaaaancccncggttgccccccggggngtttttttttggngaaaannccannctannttgggnnaaattttnnggaanctnanggaanntaaaanggnaaaaaaaaancccnggnaatnccccccnnttnaaaattccccangggnnnccnaaaaaaaaatttttnaggnnttttc

SEQ ID NO: 236 - DNA, 1469 bp, Homo Sapiens
  misc_feature (3)..(3): n is a, c, g, or t
  misc_feature (8)..(8): n is a, c, g, or t
  misc_feature (10)..(10): n is a, c, g, or t
  misc_feature (12)..(12): n is a, c, g, or t
  misc_feature (18)..(18): n is a, c, g, or t
  misc_feature (21)..(21): n is a, c, g, or t
  misc_feature (23)..(24): n is a, c, g, or t
  misc_feature (26)..(28): n is a, c, g, or t
  misc_feature (30)..(31): n is a, c, g, or t
  misc_feature (33)..(33): n is a, c, g, or t
  misc_feature (36)..(36): n is a, c, g, or t
  misc_feature (44)..(44): n is a, c, g, or t
  misc_feature (46)..(47): n is a, c, g, or t
  misc_feature (56)..(56): n is a, c, g, or t
  misc_feature (58)..(59): n is a, c, g, or t
  misc_feature (62)..(62): n is a, c, g, or t
  misc_feature (65)..(65): n is a, c, g, or t
  misc_feature (71)..(71): n is a, c, g, or t
  misc_feature (73)..(74): n is a, c, g, or t
  misc_feature (76)..(76): n is a, c, g, or t
  misc_feature (83)..(84): n is a, c, g, or t
  misc_feature (89)..(89): n is a, c, g, or t
  misc_feature (95)..(96): n is a, c, g, or t
  misc_feature (103)..(105): n is a, c, g, or t
  misc_feature (107)..(107): n is a, c, g, or t
  misc_feature (126)..(128): n is a, c, g, or t
  misc_feature (132)..(132): n is a, c, g, or t
  misc_feature (134)..(135): n is a, c, g, or t
  misc_feature (140)..(141): n is a, c, g, or t
  misc_feature (144)..(144): n is a, c, g, or t
  misc_feature (150)..(151): n is a, c, g, or t
  misc_feature (154)..(154): n is a, c, g, or t
  misc_feature (156)..(157): n is a, c, g, or t
  misc_feature (160)..(160): n is a, c, g, or t
  misc_feature (165)..(165): n is a, c, g, or t
  misc_feature (171)..(171): n is a, c, g, or t
  misc_feature (183)..(183): n is a, c, g, or t
  misc_feature (188)..(188): n is a, c, g, or t
  misc_feature (190)..(190): n is a, c, g, or t
  misc_feature (192)..(192): n is a, c, g, or t
  misc_feature (196)..(196): n is a, c, g, or t
  misc_feature (200)..(202): n is a, c, g, or t
  misc_feature (208)..(208): n is a, c, g, or t
  misc_feature (215)..(216): n is a, c, g, or t
  misc_feature (220)..(221): n is a, c, g, or t
  misc_feature (223)..(224): n is a, c, g, or t
  misc_feature (226)..(226): n is a, c, g, or t
  misc_feature (232)..(232): n is a, c, g, or t
  misc_feature (235)..(235): n is a, c, g, or t
  misc_feature (243)..(243): n is a, c, g, or t
  misc_feature (254)..(254): n is a, c, g, or t
  misc_feature (256)..(256): n is a, c, g, or t
  misc_feature (258)..(258): n is a, c, g, or t
  misc_feature (262)..(263): n is a, c, g, or t
  misc_feature (273)..(273): n is a, c, g, or t
  misc_feature (278)..(278): n is a, c, g, or t
  misc_feature (284)..(284): n is a, c, g, or t
  misc_feature (286)..(286): n is a, c, g, or t
  misc_feature (288)..(288): n is a, c, g, or t
  misc_feature (290)..(290): n is a, c, g, or t
  misc_feature (294)..(296): n is a, c, g, or t
  misc_feature (301)..(301): n is a, c, g, or t
  misc_feature (305)..(306): n is a, c, g, or t
  misc_feature (310)..(312): n is a, c, g, or t
  misc_feature (320)..(320): n is a, c, g, or t
  misc_feature (322)..(322): n is a, c, g, or t
  misc_feature (332)..(332): n is a, c, g, or t
  misc_feature (338)..(338): n is a, c, g, or t
  misc_feature (342)..(342): n is a, c, g, or t
  misc_feature (344)..(344): n is a, c, g, or t
  misc_feature (347)..(347): n is a, c, g, or t
  misc_feature (352)..(352): n is a, c, g, or t
  misc_feature (354)..(356): n is a, c, g, or t
  misc_feature (359)..(361): n is a, c, g, or t
  misc_feature (365)..(365): n is a, c, g, or t
  misc_feature (371)..(371): n is a, c, g, or t
  misc_feature (373)..(373): n is a, c, g, or t
  misc_feature (378)..(378): n is a, c, g, or t
  misc_feature (382)..(382): n is a, c, g, or t
  misc_feature (384)..(384): n is a, c, g, or t
  misc_feature (386)..(386): n is a, c, g, or t
  misc_feature (393)..(394): n is a, c, g, or t
  misc_feature (400)..(400): n is a, c, g, or t
  misc_feature (403)..(403): n is a, c, g, or t
  misc_feature (417)..(417): n is a, c, g, or t
  misc_feature (420)..(420): n is a, c, g, or t
  misc_feature (424)..(424): n is a, c, g, or t
  misc_feature (428)..(428): n is a, c, g, or t
  misc_feature (431)..(431): n is a, c, g, or t
  misc_feature (434)..(435): n is a, c, g, or t
  misc_feature (437)..(439): n is a, c, g, or t
  misc_feature (442)..(442): n is a, c, g, or t
  misc_feature (444)..(446): n is a, c, g, or t
  misc_feature (451)..(452): n is a, c, g, or t
  misc_feature (457)..(457): n is a, c, g, or t
  misc_feature (461)..(461): n is a, c, g, or t
  misc_feature (465)..(466): n is a, c, g, or t
  misc_feature (468)..(470): n is a, c, g, or t
  misc_feature (472)..(472): n is a, c, g, or t
  misc_feature (476)..(476): n is a, c, g, or t
  misc_feature (478)..(478): n is a, c, g, or t
  misc_feature (481)..(481): n is a, c, g, or t
  misc_feature (484)..(484): n is a, c, g, or t
  misc_feature (494)..(495): n is a, c, g, or t
  misc_feature (501)..(502): n is a, c, g, or t
  misc_feature (504)..(504): n is a, c, g, or t
  misc_feature (509)..(509): n is a, c, g, or t
  misc_feature (512)..(512): n is a, c, g, or t
  misc_feature (514)..(514): n is a, c, g, or t
  misc_feature (520)..(521): n is a, c, g, or t
  misc_feature (524)..(524): n is a, c, g, or t
  misc_feature (528)..(530): n is a, c, g, or t
  misc_feature (532)..(532): n is a, c, g, or t
  misc_feature (534)..(534): n is a, c, g, or t
  misc_feature (537)..(537): n is a, c, g, or t
  misc_feature (539)..(539): n is a, c, g, or t
  misc_feature (542)..(542): n is a, c, g, or t
  misc_feature (547)..(547): n is a, c, g, or t
  misc_feature (551)..(553): n is a, c, g, or t
  misc_feature (555)..(556): n is a, c, g, or t
  misc_feature (560)..(562): n is a, c, g, or t
  misc_feature (565)..(567): n is a, c, g, or t
  misc_feature (569)..(569): n is a, c, g, or t
  misc_feature (571)..(571): n is a, c, g, or t
  misc_feature (573)..(573): n is a, c, g, or t
  misc_feature (575)..(575): n is a, c, g, or t
  misc_feature (577)..(577): n is a, c, g, or t
  misc_feature (583)..(583): n is a, c, g, or t
  misc_feature (591)..(593): n is a, c, g, or t
  misc_feature (596)..(596): n is a, c, g, or t
  misc_feature (598)..(599): n is a, c, g, or t
  misc_feature (603)..(604): n is a, c, g, or t
  misc_feature (607)..(607): n is a, c, g, or t
  misc_feature (610)..(610): n is a, c, g, or t
  misc_feature (614)..(614): n is a, c, g, or t
  misc_feature (617)..(618): n is a, c, g, or t
  misc_feature (624)..(626): n is a, c, g, or t
  misc_feature (630)..(631): n is a, c, g, or t
  misc_feature (634)..(634): n is a, c, g, or t
  misc_feature (638)..(638): n is a, c, g, or t
  misc_feature (643)..(643): n is a, c, g, or t
  misc_feature (647)..(647): n is a, c, g, or t
  misc_feature (649)..(649): n is a, c, g, or t
  misc_feature (655)..(655): n is a, c, g, or t
  misc_feature (657)..(657): n is a, c, g, or t
  misc_feature (660)..(661): n is a, c, g, or t
  misc_feature (667)..(668): n is a, c, g, or t
  misc_feature (670)..(670): n is a, c, g, or t
  misc_feature (673)..(673): n is a, c, g, or t
  misc_feature (676)..(679): n is a, c, g, or t
  misc_feature (681)..(681): n is a, c, g, or t
  misc_feature (685)..(685): n is a, c, g, or t
  misc_feature (688)..(690): n is a, c, g, or t
  misc_feature (695)..(696): n is a, c, g, or t
  misc_feature (699)..(699): n is a, c, g, or t
  misc_feature (701)..(701): n is a, c, g, or t
  misc_feature (705)..(708): n is a, c, g, or t
  misc_feature (710)..(711): n is a, c, g, or t
  misc_feature (713)..(713): n is a, c, g, or t
  misc_feature (719)..(719): n is a, c, g, or t
  misc_feature (731)..(732): n is a, c, g, or t
  misc_feature (734)..(737): n is a, c, g, or t
  misc_feature (742)..(743): n is a, c, g, or t
  misc_feature (745)..(747): n is a, c, g, or t
  misc_feature (749)..(749): n is a, c, g, or t
  misc_feature (755)..(755): n is a, c, g, or t
  misc_feature (762)..(763): n is a, c, g, or t
  misc_feature (765)..(765): n is a, c, g, or t
  misc_feature (770)..(770): n is a, c, g, or t
  misc_feature (772)..(772): n is a, c, g, or t
  misc_feature (774)..(774): n is a, c, g, or t
  misc_feature (779)..(779): n is a, c, g, or t
  misc_feature (783)..(784): n is a, c, g, or t
  misc_feature (787)..(787): n is a, c, g, or t
  misc_feature (790)..(791): n is a, c, g, or t
  misc_feature (806)..(806): n is a, c, g, or t
  misc_feature (814)..(815): n is a, c, g, or t
  misc_feature (818)..(818): n is a, c, g, or t
  misc_feature (820)..(820): n is a, c, g, or t
  misc_feature (825)..(825): n is a, c, g, or t
  misc_feature (828)..(828): n is a, c, g, or t
  misc_feature (832)..(833): n is a, c, g, or t
  misc_feature (839)..(841): n is a, c, g, or t
  misc_feature (844)..(844): n is a, c, g, or t
  misc_feature (846)..(846): n is a, c, g, or t
  misc_feature (848)..(849): n is a, c, g, or t
  misc_feature (854)..(854): n is a, c, g, or t
  misc_feature (857)..(857): n is a, c, g, or t
  misc_feature (859)..(860): n is a, c, g, or t
  misc_feature (866)..(866): n is a, c, g, or t
  misc_feature (868)..(868): n is a, c, g, or t
  misc_feature (871)..(871): n is a, c, g, or t
  misc_feature (874)..(877): n is a, c, g, or t
  misc_feature (879)..(880): n is a, c, g, or t
  misc_feature (891)..(892): n is a, c, g, or t
  misc_feature (896)..(898): n is a, c, g, or t
  misc_feature (900)..(900): n is a, c, g, or t
  misc_feature (902)..(903): n is a, c, g, or t
  misc_feature (905)..(905): n is a, c, g, or t
  misc_feature (909)..(909): n is a, c, g, or t
  misc_feature (916)..(916): n is a, c, g, or t
  misc_feature (918)..(918): n is a, c, g, or t
  misc_feature (921)..(923): n is a, c, g, or t
  misc_feature (925)..(926): n is a, c, g, or t
  misc_feature (928)..(929): n is a, c, g, or t
  misc_feature (932)..(932): n is a, c, g, or t
  misc_feature (936)..(936): n is a, c, g, or t
  misc_feature (938)..(938): n is a, c, g, or t
  misc_feature (942)..(942): n is a, c, g, or t
  misc_feature (944)..(944): n is a, c, g, or t
  misc_feature (947)..(947): n is a, c, g, or t
  misc_feature (953)..(954): n is a, c, g, or t
  misc_feature (956)..(958): n is a, c, g, or t
  misc_feature (961)..(961): n is a, c, g, or t
  misc_feature (965)..(966): n is a, c, g, or t
  misc_feature (969)..(969): n is a, c, g, or t
  misc_feature (971)..(971): n is a, c, g, or t
  misc_feature (977)..(977): n is a, c, g, or t
  misc_feature (981)..(982): n is a, c, g, or t
  misc_feature (985)..(986): n is a, c, g, or t
  misc_feature (991)..(991): n is a, c, g, or t
  misc_feature (999)..(999): n is a, c, g, or t
  misc_feature (1002)..(1002): n is a, c, g, or t
  misc_feature (1004)..(1004): n is a, c, g, or t
  misc_feature (1008)..(1011): n is a, c, g, or t
  misc_feature (1013)..(1013): n is a, c, g, or t
  misc_feature (1015)..(1016): n is a, c, g, or t
  misc_feature (1018)..(1021): n is a, c, g, or t
  misc_feature (1027)..(1027): n is a, c, g, or t
  misc_feature (1031)..(1032): n is a, c, g, or t
  misc_feature (1034)..(1034): n is a, c, g, or t
  misc_feature (1040)..(1041): n is a, c, g, or t
  misc_feature (1044)..(1044): n is a, c, g, or t
  misc_feature (1046)..(1046): n is a, c, g, or t
  misc_feature (1048)..(1048): n is a, c, g, or t
  misc_feature (1051)..(1051): n is a, c, g, or t
  misc_feature (1054)..(1054): n is a, c, g, or t
  misc_feature (1057)..(1057): n is a, c, g, or t
  misc_feature (1061)..(1061): n is a, c, g, or t
  misc_feature (1064)..(1064): n is a, c, g, or t
  misc_feature (1070)..(1071): n is a, c, g, or t
  misc_feature (1073)..(1076): n is a, c, g, or t
  misc_feature (1078)..(1078): n is a, c, g, or t
  misc_feature (1081)..(1081): n is a, c, g, or t
  misc_feature (1085)..(1085): n is a, c, g, or t
  misc_feature (1092)..(1092): n is a, c, g, or t
  misc_feature (1104)..(1104): n is a, c, g, or t
  misc_feature (1107)..(1108): n is a, c, g, or t
  misc_feature (1111)..(1111): n is a, c, g, or t
  misc_feature (1115)..(1115): n is a, c, g, or t
  misc_feature (1118)..(1119): n is a, c, g, or t
  misc_feature (1121)..(1121): n is a, c, g, or t
  misc_feature (1125)..(1125): n is a, c, g, or t
  misc_feature (1127)..(1128): n is a, c, g, or t
  misc_feature (1130)..(1132): n is a, c, g, or t
  misc_feature (1135)..(1136): n is a, c, g, or t
  misc_feature (1143)..(1143): n is a, c, g, or t
  misc_feature (1148)..(1150): n is a, c, g, or t
  misc_feature (1154)..(1154): n is a, c, g, or t
  misc_feature (1164)..(1164): n is a, c, g, or t
  misc_feature (1172)..(1172): n is a, c, g, or t
  misc_feature (1174)..(1175): n is a, c, g, or t
  misc_feature (1178)..(1178): n is a, c, g, or t
  misc_feature (1181)..(1182): n is a, c, g, or t
  misc_feature (1190)..(1190): n is a, c, g, or t
  misc_feature (1192)..(1193): n is a, c, g, or t
  misc_feature (1195)..(1195): n is a, c, g, or t
  misc_feature (1200)..(1202): n is a, c, g, or t
  misc_feature (1210)..(1210): n is a, c, g, or t
  misc_feature (1213)..(1213): n is a, c, g, or t
  misc_feature (1218)..(1221): n is a, c, g, or t
  misc_feature (1228)..(1228): n is a, c, g, or t
  misc_feature (1236)..(1237): n is a, c, g, or t
  misc_feature (1240)..(1240): n is a, c, g, or t
  misc_feature (1251)..(1253): n is a, c, g, or t
  misc_feature (1255)..(1255): n is a, c, g, or t
  misc_feature (1257)..(1259): n is a, c, g, or t
  misc_feature (1262)..(1262): n is a, c, g, or t
  misc_feature (1264)..(1264): n is a, c, g, or t
  misc_feature (1269)..(1269): n is a, c, g, or t
  misc_feature (1273)..(1273): n is a, c, g, or t
  misc_feature (1278)..(1278): n is a, c, g, or t
  misc_feature (1282)..(1282): n is a, c, g, or t
  misc_feature (1286)..(1286): n is a, c, g, or t
  misc_feature (1288)..(1288): n is a, c, g, or t
  misc_feature (1290)..(1290): n is a, c, g, or t
  misc_feature (1293)..(1293): n is a, c, g, or t
  misc_feature (1297)..(1297): n is a, c, g, or t
  misc_feature (1302)..(1304): n is a, c, g, or t
  misc_feature (1306)..(1306): n is a, c, g, or t
  misc_feature (1308)..(1308): n is a, c, g, or t
  misc_feature (1310)..(1310): n is a, c, g, or t
  misc_feature (1314)..(1314): n is a, c, g, or t
  misc_feature (1316)..(1317): n is a, c, g, or t
  misc_feature (1322)..(1324): n is a, c, g, or t
  misc_feature (1326)..(1326): n is a, c, g, or t
  misc_feature (1328)..(1328): n is a, c, g, or t
  misc_feature (1331)..(1332): n is a, c, g, or t
  misc_feature (1336)..(1338): n is a, c, g, or t
  misc_feature (1341)..(1341): n is a, c, g, or t
  misc_feature (1343)..(1344): n is a, c, g, or t
  misc_feature (1348)..(1348): n is a, c, g, or t
  misc_feature (1350)..(1350): n is a, c, g, or t
  misc_feature (1352)..(1353): n is a, c, g, or t
  misc_feature (1355)..(1355): n is a, c, g, or t
  misc_feature (1359)..(1360): n is a, c, g, or t
  misc_feature (1365)..(1365): n is a, c, g, or t
  misc_feature (1371)..(1371): n is a, c, g, or t
  misc_feature (1380)..(1381): n is a, c, g, or t
  misc_feature (1384)..(1386): n is a, c, g, or t
  misc_feature (1389)..(1389): n is a, c, g, or t
  misc_feature (1394)..(1395): n is a, c, g, or t
  misc_feature (1398)..(1399): n is a, c, g, or t
  misc_feature (1404)..(1406): n is a, c, g, or t
  misc_feature (1408)..(1408): n is a, c, g, or t
  misc_feature (1412)..(1412): n is a, c, g, or t
  misc_feature (1425)..(1425): n is a, c, g, or t
  misc_feature (1427)..(1427): n is a, c, g, or t
  misc_feature (1430)..(1430): n is a, c, g, or t
  misc_feature (1432)..(1432): n is a, c, g, or t
  misc_feature (1437)..(1437): n is a, c, g, or t
  misc_feature (1440)..(1442): n is a, c, g, or t
  misc_feature (1444)..(1444): n is a, c, g, or t
  misc_feature (1447)..(1447): n is a, c, g, or t
  misc_feature (1456)..(1456): n is a, c, g, or t
  misc_feature (1458)..(1459): n is a, c, g, or t
  misc_feature (1462)..(1462): n is a, c, g, or t
  misc_feature (1466)..(1466): n is a, c, g, or t
  misc_feature (1468)..(1468): n is a, c, g, or t
cancatgntncnccaaanaangnnannnanntnttnggaggggngnngttttcccntnnccnttntcgggntnntnttttttnnggggngaaaannccccatnnnanggggacccccgcgttccgnnntcgnannactanntcnccgctnnagncnnaanagacncctgcncacagtctgtgntcgcntngngtgnatgnnnacgcgnttgcagnnttgnncnncngtgccnccntatggtcnccattcaaccnananagcnnccatgaatgngcgtngcttgnantncncatnnngacanctgnngctnnncggtaccngnagccaagatntataanaggnantgnccatncnnnagnnncggnataaanangggcncaanananttgaaannacagcnacncgtgggctcgatancancggnatanacnccnncnnnggnannncggannaatantctngcanngnnngnatgngncanccnagagaaatgnngtgtcnncnctgtnaantnttttgnnctncagnnntntntancncanatcgngcannntnnctcnnnatnnncngntntntncgggtnatgattgnnntgncnnaaanntgnccngtcnaannatgatnnnccgnncantttnatgtntacncncagcgntntcnnctgttnngngcnagnnnntntctngcnnnactcnnagngncatnnnncnnanagatgnctggatatgatnntnnnntgcannannntngatttncttcctnnanttccnangnaacancaanntgngtnnggactcatgctttcngtaaagannctncntgatntanccanngtattnnnagntnanncaacnctnannctccanantcncannnnannattttccttcnncaannngnannantttnaccgtcncngtnnntnntnnaanttgncntttncnccntttaanntnnntantgcnnaancnatattncggnnagnnaaggntgtccaanaantntttnnnncnannannnngtaatntccnntncttccnnatnantnggnacnctncgtnaantctccnntnnnncntcncctnattaatnagtaaaccattngtnnacnctgnccnnanttananntnnnccnntataacngcaannnaccnttacattctnccttcaancnnaanaannaaaaaacnanntntattnnngataagantangattnnnnattaccnacttatannaantaaaaactatnnntncnnnaanancaatnccantaccnttanaccntntnganctcngacannncngnantccncnnttcannnangngcnnaatnnntantnncccngncnntngaanncttgntaaaanagaacaatnnatnnnccnctatnntgnnctttnnncnattntaaaaacaaaaangnaantnttttnttnnnanaanctgtccctntnnaancctntng

SEQ ID NO: 237 - DNA, 1349 bp, Homo Sapiens
  misc_feature (895)..(895): n is a, c, g, or t
  misc_feature (983)..(983): n is a, c, g, or t
  misc_feature (988)..(988): n is a, c, g, or t
  misc_feature (993)..(993): n is a, c, g, or t
  misc_feature (999)..(999): n is a, c, g, or t
  misc_feature (1008)..(1008): n is a, c, g, or t
  misc_feature (1061)..(1061): n is a, c, g, or t
  misc_feature (1069)..(1069): n is a, c, g, or t
  misc_feature (1071)..(1071): n is a, c, g, or t
  misc_feature (1078)..(1078): n is a, c, g, or t
  misc_feature (1089)..(1089): n is a, c, g, or t
  misc_feature (1119)..(1119): n is a, c, g, or t
  misc_feature (1123)..(1124): n is a, c, g, or t
  misc_feature (1128)..(1128): n is a, c, g, or t
  misc_feature (1136)..(1137): n is a, c, g, or t
  misc_feature (1142)..(1142): n is a, c, g, or t
  misc_feature (1151)..(1151): n is a, c, g, or t
  misc_feature (1160)..(1160): n is a, c, g, or t
  misc_feature (1184)..(1184): n is a, c, g, or t
  misc_feature (1191)..(1191): n is a, c, g, or t
  misc_feature (1197)..(1197): n is a, c, g, or t
  misc_feature (1209)..(1210): n is a, c, g, or t
  misc_feature (1220)..(1221): n is a, c, g, or t
  misc_feature (1226)..(1226): n is a, c, g, or t
  misc_feature (1240)..(1240): n is a, c, g, or t
  misc_feature (1245)..(1245): n is a, c, g, or t
  misc_feature (1248)..(1249): n is a, c, g, or t
  misc_feature (1259)..(1259): n is a, c, g, or t
  misc_feature (1270)..(1273): n is a, c, g, or t
  misc_feature (1275)..(1277): n is a, c, g, or t
  misc_feature (1288)..(1288): n is a, c, g, or t
  misc_feature (1306)..(1306): n is a, c, g, or t
  misc_feature (1312)..(1312): n is a, c, g, or t
  misc_feature (1322)..(1322): n is a, c, g, or t
  misc_feature (1328)..(1328): n is a, c, g, or t
  misc_feature (1332)..(1332): n is a, c, g, or t
  misc_feature (1336)..(1336): n is a, c, g, or t
  misc_feature (1340)..(1340): n is a, c, g, or t
tagagaaattactatgagaggatcgcatcaccatcaccatcacggatcctatttaggtgacactatagaatcgtcgacccacgcgtccgcggaagaaggcgctgctgaagctggagaagctggacacagacctgaagaactacaagggcaactccatcaaagagagcatccggcgcggccacgacgacctgggcgaccactacctggactgtggggacctcagcaacgccctcaagtgctattcccgggcccgggactactgcaccagcgccaaacacgtcatcaacatgtgcctcaatgtcatcaaggtcagcgtctacttgcagaattggtctcatgtgctcagctacgtcagcaaggctgagtccaccccagagattgccgagcagcgaggagagcgtgacagccagacccaggccatcctcaccaagctcaagtgtgccgcaggcttggcagagctggccgccaggaagtacaagcaggctgccaagtgcctcctgctggcttcctttgatcactgtgacttccctgagctgctgtcccccagcaacgtggccatctacggtggcctgtgcgccttggctacctttgaccggcaggagctgcagcgcaatgtcatctccagcagctccttcaagttgttcttggagctggagccacaggtccgagacatcatcttcaaattctacgagtccaagtacgcctcatgtctcaagatgctggacgagatgaaggacaacctgctcctggacatgtatctggccccccatgtcaggaccctgtacacccagattcgcaaccgtgccctcatccagtatttcagcccctacgtgtcagccgacatgcataggatggcggcagccttcaataccacggtggccgcccctggaggacnagctgacgcagctaatcctggagggggctgatcagtgcccgtgtggactcacacagcaagatcctatacgccccgggacgtggatcancgcancaccncctttnaaaaatctnttgttgatgggcaaggaatttccagcgccccccccaaggccatgaatgctgcnggcaactntntctcccncaaccaaaatnccatgttcaagtccccccccccaaaaaaangganncccngggggganntttanttccagccnaaaacccantcccggaaaaaaccccaaaatgtngaggggngaaacnttggccctccannaaaatttggnnccccnttccccccttccanggaanctnngaaacttccngggggttttannnntnnntggggcccaantaagggggcctgggcccntggggncccccccccngggggncccncccngggntaaaaaaaa

SEQ ID NO: 238 - DNA, 256 bp, Homo Sapiens
  misc_feature (2)..(2): n is a, c, g, or t
  misc_feature (52)..(52): n is a, c, g, or t
  misc_feature (226)..(226): n is a, c, g, or t
cnctgacgaggatcgcatcaccatcaccatcacggatcctatttaggtgacnctatagaatcgtcgacccacgcgtccgagaccaacttcattgacatggagaacatgtttgacttgctgaaagaggagacagaagtgaaggaccttcctggagcagggccccttcgctttcagaagggccgtattgagtttgagaacgtgcacttcagctatgccgatgggcggnagactctgcaggacgtgtctttcactgtga

SEQ ID NO: 239 - DNA, 837 bp, Homo Sapiens
  misc_feature (584)..(584): n is a, c, g, or t
  misc_feature (608)..(608): n is a, c, g, or t
  misc_feature (622)..(622): n is a, c, g, or t
  misc_feature (639)..(639): n is a, c, g, or t
  misc_feature (649)..(649): n is a, c, g, or t
  misc_feature (677)..(677): n is a, c, g, or t
  misc_feature (680)..(680): n is a, c, g, or t
  misc_feature (703)..(704): n is a, c, g, or t
  misc_feature (708)..(708): n is a, c, g, or t
  misc_feature (710)..(710): n is a, c, g, or t
  misc_feature (718)..(718): n is a, c, g, or t
  misc_feature (720)..(720): n is a, c, g, or t
  misc_feature (723)..(723): n is a, c, g, or t
  misc_feature (730)..(730): n is a, c, g, or t
  misc_feature (739)..(741): n is a, c, g, or t
  misc_feature (745)..(750): n is a, c, g, or t
  misc_feature (754)..(754): n is a, c, g, or t
  misc_feature (762)..(767): n is a, c, g, or t
  misc_feature (771)..(785): n is a, c, g, or t
  misc_feature (789)..(797): n is a, c, g, or t
  misc_feature (800)..(805): n is a, c, g, or t
  misc_feature (808)..(817): n is a, c, g, or t
  misc_feature (819)..(824): n is a, c, g, or t
  misc_feature (829)..(834): n is a, c, g, or t
  misc_feature (836)..(837): n is a, c, g, or t
tagagaaattactatgagaggatcgcatcaccatcaccatcacggatcctatttaggtgacactatagaatcgtcgacccacgcgtccggcctcgagtttggaagaaaacaaggcagtagtaaggaggaacaggaaaggaagaggctgatccacaaacacaagcgtgaatttaaaggggccgttcgagaaatccgcaaggacaatcagttcctggcgaggatgcaactctcagaaatcatggaacgggatgcggaaagaaagcggaaagtaaagcagctttttaacagcctggctacacaggaaggcgaatggaaggctctgaagaggaaaaagttcaaaaaataaattacattttataaataaggcaaggaactggacattacctcacatctgcaattccaaccctctgggaggccaaggcaggaggattgcttcagcccgggagttcgagaccagcctgggcaacacaggaagaccccgtctctaccagaaaaacataaaaattagccaagtgtggtggcacgcacctgtggtcccaactactcgggaggctgaagcaggaggactgcttgagctgagtccnaggttacagtgagccgtgattganccactgcactccancctcggccacagtgcangactgtgtcncttaaaaaaaaatttttttttttttganacngaatttttgctcttgttgcccannctgnantgcactgncncanccttccncctccctgnnnttcnnnnnnattntcctgccnnnnnnctcnnnnnnnnnnnnnnntacnnnnnnnnncannnnnnccnnnnnnnnnntnnnnnnttttnnnnnnann

SEQ ID NO: 240 - DNA, 1211 bp, Homo Sapiens
  misc_feature (1)..(2): n is a, c, g, or t
  misc_feature (16)..(16): n is a, c, g, or t
  misc_feature (950)..(950): n is a, c, g, or t
  misc_feature (971)..(971): n is a, c, g, or t
  misc_feature (975)..(975): n is a, c, g, or t
  misc_feature (980)..(980): n is a, c, g, or t
  misc_feature (990)..(990): n is a, c, g, or t
  misc_feature (1007)..(1007): n is a, c, g, or t
  misc_feature (1018)..(1018): n is a, c, g, or t
  misc_feature (1024)..(1024): n is a, c, g, or t
  misc_feature (1032)..(1032): n is a, c, g, or t
  misc_feature (1034)..(1034): n is a, c, g, or t
  misc_feature (1036)..(1036): n is a, c, g, or t
  misc_feature (1086)..(1086): n is a, c, g, or t
  misc_feature (1088)..(1088): n is a, c, g, or t
  misc_feature (1104)..(1104): n is a, c, g, or t
  misc_feature (1108)..(1108): n is a, c, g, or t
  misc_feature (1114)..(1114): n is a, c, g, or t
  misc_feature (1119)..(1119): n is a, c, g, or t
  misc_feature (1122)..(1122): n is a, c, g, or t
  misc_feature (1126)..(1126): n is a, c, g, or t
  misc_feature (1136)..(1137): n is a, c, g, or t
  misc_feature (1139)..(1139): n is a, c, g, or t
  misc_feature (1141)..(1142): n is a, c, g, or t
  misc_feature (1144)..(1144): n is a, c, g, or t
  misc_feature (1159)..(1159): n is a, c, g, or t
  misc_feature (1161)..(1161): n is a, c, g, or t
  misc_feature (1165)..(1165): n is a, c, g, or t
  misc_feature (1167)..(1167): n is a, c, g, or t
  misc_feature (1170)..(1170): n is a, c, g, or t
  misc_feature (1178)..(1178): n is a, c, g, or t
  misc_feature (1184)..(1185): n is a, c, g, or t
  misc_feature (1187)..(1190): n is a, c, g, or t
  misc_feature (1192)..(1192): n is a, c, g, or t
  misc_feature (1201)..(1201): n is a, c, g, or t
  misc_feature (1203)..(1203): n is a, c, g, or t
  misc_feature (1207)..(1207): n is a, c, g, or t
nnaatagagaaattanctatgagaggatcgcatcaccatcaccatcacggatcctatttaggtgacactatagaatcgtcgacccacgcgtccgccaccgccgaggaaaaccgtgtgctattagccatggtcaaccccaccgtgttcttcgacattgccgtcgacggcgagcccttgggccgcgtctcctttgagctgtttgcagacaaggtcccaaagacagcagaaaattttcgtgctctgagcactggagagaaaggatttggttataagggttcctgctttcacagaattattccagggtttatgtgtcagggtggtgacttcacacgccataatggcactggtggcaagtccatctatggggagaaatttgaagatgagaacttcatcctaaagcatacgggtcctggcatcttgtccatggcaaatgctggacccaacacaaatggttcccagtttttcatctgcactgccaagactgagtggttggatggcaagcatgtggtgtttggcaaagtgaaagaaggcatgaatattgtggaggccatggagcgctttgggtccaggaatggcaagaccagcaagaagatcaccattgctgactgtggacaactcgaataagtttgacttgtgttttatcttaaccaccagatcattccttctgtagctcaggagagcacccctccaccccatttgctcgcagtatcctagaatctttgtgctctcgctgcagttccctttgggttccatgttttccttgttccctcccatgcctagctggattgcagagttaagtttatgattatgaaataaaaactaaataacaattgtcctcgtttgagttaagagtgttgatgtaggctttattttaagcagtaatgggttacttctgaaacatcacttgtttgcttaattctacacagtacttagatttttttttactttcnagtcccaggaagtgtcaatgnttgnttgangtggaatatngaaaatgtaggcagcanctgggcatggnggctcnctgtctgnangnattacctgaggcaaaaaacccctgagggtagaatcaaaatcccctgggcnanaaatggaaccctgtcnctcnaaaaanaatanccnggcngggggggcanncnanncnaactaattggagctnantggnanatncttgaccnaaaggnncnnnnanctgcccttnanaccngggg

SEQ ID NO: 241 - DNA, 256 bp, Homo Sapiens
ccacgcgtccggaagaatttctctttagttctttgcaagaaggtagagataaagacactttttcaaaaatggcaatggtatcagaattcctcaagcaggcctggtttattgaaaatgaagagcaggaatatgttcaaactgtgaagtcatccaaaggtggtcccggatcagcggtgagcccctatcctaccttcaatccatcctcggatgtcgctgccttgcataaggccataatggttaaaggtgtggatgaagc

SEQ ID NO: 242 - DNA, 1528 bp, Homo Sapiens
  misc_feature (24)..(24): n is a, c, g, or t
  misc_feature (33)..(33): n is a, c, g, or t
  misc_feature (35)..(35): n is a, c, g, or t
  misc_feature (55)..(55): n is a, c, g, or t
  misc_feature (62)..(62): n is a, c, g, or t
  misc_feature (67)..(67): n is a, c, g, or t
  misc_feature (69)..(69): n is a, c, g, or t
  misc_feature (71)..(72): n is a, c, g, or t
  misc_feature (82)..(82): n is a, c, g, or t
  misc_feature (90)..(90): n is a, c, g, or t
  misc_feature (92)..(92): n is a, c, g, or t
  misc_feature (106)..(106): n is a, c, g, or t
  misc_feature (118)..(118): n is a, c, g, or t
  misc_feature (120)..(120): n is a, c, g, or t
  misc_feature (122)..(122): n is a, c, g, or t
  misc_feature (124)..(124): n is a, c, g, or t
  misc_feature (140)..(140): n is a, c, g, or t
  misc_feature (145)..(145): n is a, c, g, or t
  misc_feature (148)..(149): n is a, c, g, or t
  misc_feature (151)..(151): n is a, c, g, or t
  misc_feature (153)..(153): n is a, c, g, or t
  misc_feature (155)..(158): n is a, c, g, or t
  misc_feature (169)..(169): n is a, c, g, or t
  misc_feature (173)..(175): n is a, c, g, or t
  misc_feature (177)..(177): n is a, c, g, or t
  misc_feature (189)..(190): n is a, c, g, or t
  misc_feature (192)..(193): n is a, c, g, or t
  misc_feature (202)..(202): n is a, c, g, or t
  misc_feature (204)..(208): n is a, c, g, or t
  misc_feature (217)..(217): n is a, c, g, or t
  misc_feature (221)..(222): n is a, c, g, or t
  misc_feature (240)..(241): n is a, c, g, or t
  misc_feature (248)..(248): n is a, c, g, or t
  misc_feature (251)..(251): n is a, c, g, or t
  misc_feature (258)..(258): n is a, c, g, or t
  misc_feature (275)..(275): n is a, c, g, or t
  misc_feature (289)..(289): n is a, c, g, or t
  misc_feature (295)..(296): n is a, c, g, or t
  misc_feature (302)..(302): n is a, c, g, or t
  misc_feature (307)..(309): n is a, c, g, or t
  misc_feature (313)..(313): n is a, c, g, or t
  misc_feature (330)..(330): n is a, c, g, or t
  misc_feature (332)..(335): n is a, c, g, or t
  misc_feature (340)..(340): n is a, c, g, or t
  misc_feature (342)..(342): n is a, c, g, or t
  misc_feature (345)..(345): n is a, c, g, or t
  misc_feature (352)..(352): n is a, c, g, or t
  misc_feature (354)..(355): n is a, c, g, or t
  misc_feature (361)..(361): n is a, c, g, or t
  misc_feature (365)..(365): n is a, c, g, or t
  misc_feature (373)..(373): n is a, c, g, or t
  misc_feature (376)..(376): n is a, c, g, or t
  misc_feature (379)..(379): n is a, c, g, or t
  misc_feature (392)..(392): n is a, c, g, or t
  misc_feature (402)..(402): n is a, c, g, or t
  misc_feature (405)..(405): n is a, c, g, or t
  misc_feature (408)..(408): n is a, c, g, or t
  misc_feature (410)..(410): n is a, c, g, or t
  misc_feature (419)..(419): n is a, c, g, or t
  misc_feature (422)..(422): n is a, c, g, or t
  misc_feature (424)..(424): n is a, c, g, or t
  misc_feature (429)..(429): n is a, c, g, or t
  misc_feature (436)..(436): n is a, c, g, or t
  misc_feature (439)..(439): n is a, c, g, or t
  misc_feature (442)..(442): n is a, c, g, or t
  misc_feature (445)..(445): n is a, c, g, or t
  misc_feature (455)..(456): n is a, c, g, or t
  misc_feature (459)..(460): n is a, c, g, or t
  misc_feature (462)..(462): n is a, c, g, or t
  misc_feature (469)..(469): n is a, c, g, or t
  misc_feature (471)..(472): n is a, c, g, or t
  misc_feature (474)..(474): n is a, c, g, or t
  misc_feature (477)..(477): n is a, c, g, or t
  misc_feature (480)..(483): n is a, c, g, or t
  misc_feature (485)..(485): n is a, c, g, or t
  misc_feature (487)..(487): n is a, c, g, or t
  misc_feature (489)..(489): n is a, c, g, or t
  misc_feature (494)..(495): n is a, c, g, or t
  misc_feature (497)..(497): n is a, c, g, or t
  misc_feature (502)..(502): n is a, c, g, or t
  misc_feature (508)..(508): n is a, c, g, or t
  misc_feature (512)..(512): n is a, c, g, or t
  misc_feature (516)..(516): n is a, c, g, or t
  misc_feature (524)..(525): n is a, c, g, or t
  misc_feature (529)..(529): n is a, c, g, or t
  misc_feature (547)..(549): n is a, c, g, or t
  misc_feature (555)..(555): n is a, c, g, or t
  misc_feature (558)..(558): n is a, c, g, or t
  misc_feature (567)..(570): n is a, c, g, or t
  misc_feature (574)..(574): n is a, c, g, or t
  misc_feature (580)..(581): n is a, c, g, or t
  misc_feature (585)..(585): n is a, c, g, or t
  misc_feature (589)..(589): n is a, c, g, or t
  misc_feature (600)..(600): n is a, c, g, or t
  misc_feature (602)..(602): n is a, c, g, or t
  misc_feature (612)..(612): n is a, c, g, or t
  misc_feature (615)..(615): n is a, c, g, or t
  misc_feature (620)..(620): n is a, c, g, or t
  misc_feature (622)..(622): n is a, c, g, or t
  misc_feature (624)..(627): n is a, c, g, or t
  misc_feature (630)..(630): n is a, c, g, or t
  misc_feature (639)..(639): n is a, c, g, or t
  misc_feature (647)..(647): n is a, c, g, or t
  misc_feature (650)..(650): n is a, c, g, or t
  misc_feature (652)..(652): n is a, c, g, or t
  misc_feature (657)..(657): n is a, c, g, or t
  misc_feature (661)..(661): n is a, c, g, or t
  misc_feature (665)..(665): n is a, c, g, or t
  misc_feature (667)..(668): n is a, c, g, or t
  misc_feature (673)..(674): n is a, c, g, or t
  misc_feature (678)..(681): n is a, c, g, or t
  misc_feature (693)..(693): n is a, c, g, or t
  misc_feature (695)..(695): n is a, c, g, or t
  misc_feature (699)..(699): n is a, c, g, or t
  misc_feature (712)..(712): n is a, c, g, or t
  misc_feature (716)..(716): n is a, c, g, or t
  misc_feature (718)..(719): n is a, c, g, or t
  misc_feature (727)..(727): n is a, c, g, or t
  misc_feature (730)..(730): n is a, c, g, or t
  misc_feature (733)..(736): n is a, c, g, or t
  misc_feature (741)..(741): n is a, c, g, or t
  misc_feature (748)..(748): n is a, c, g, or t
  misc_feature (752)..(752): n is a, c, g, or t
  misc_feature (754)..(756): n is a, c, g, or t
  misc_feature (758)..(758): n is a, c, g, or t
  misc_feature (763)..(763): n is a, c, g, or t
  misc_feature (766)..(770): n is a, c, g, or t
  misc_feature (778)..(778): n is a, c, g, or t
  misc_feature (780)..(783): n is a, c, g, or t
  misc_feature (785)..(786): n is a, c, g, or t
  misc_feature (789)..(789): n is a, c, g, or t
  misc_feature (791)..(791): n is a, c, g, or t
  misc_feature (795)..(795): n is a, c, g, or t
  misc_feature (799)..(799): n is a, c, g, or t
  misc_feature (804)..(804): n is a, c, g, or t
  misc_feature (807)..(808): n is a, c, g, or t
  misc_feature (818)..(818): n is a, c, g, or t
  misc_feature (821)..(822): n is a, c, g, or t
  misc_feature (826)..(826): n is a, c, g, or t
  misc_feature (833)..(833): n is a, c, g, or t
  misc_feature (838)..(839): n is a, c, g, or t
  misc_feature (846)..(849): n is a, c, g, or t
  misc_feature (852)..(854): n is a, c, g, or t
  misc_feature (858)..(859): n is a, c, g, or t
  misc_feature (863)..(863): n is a, c, g, or t
  misc_feature (866)..(866): n is a, c, g, or t
  misc_feature (871)..(871): n is a, c, g, or t
  misc_feature (873)..(873): n is a, c, g, or t
  misc_feature (875)..(878): n is a, c, g, or t
  misc_feature (892)..(892): n is a, c, g, or t
  misc_feature (894)..(895): n is a, c, g, or t
  misc_feature (898)..(899): n is a, c, g, or t
  misc_feature (902)..(902): n is a, c, g, or t
  misc_feature (904)..(904): n is a, c, g, or t
  misc_feature (907)..(907): n is a, c, g, or t
  misc_feature (910)..(910): n is a, c, g, or t
  misc_feature (913)..(913): n is a, c, g, or t
  misc_feature (915)..(915): n is a, c, g, or t
  misc_feature (919)..(919): n is a, c, g, or t
  misc_feature (921)..(922): n is a, c, g, or t
  misc_feature (930)..(930): n is a, c, g, or t
  misc_feature (933)..(934): n is a, c, g, or t
  misc_feature (937)..(937): n is a, c, g, or t
  misc_feature (939)..(939): n is a, c, g, or t
  misc_feature (944)..(945): n is a, c, g, or t
  misc_feature (948)..(951): n is a, c, g, or t
  misc_feature (956)..(956): n is a, c, g, or t
  misc_feature (962)..(962): n is a, c, g, or t
  misc_feature (967)..(967): n is a, c, g, or t
  misc_feature (970)..(970): n is a, c, g, or t
  misc_feature (977)..(977): n is a, c, g, or t
  misc_feature (982)..(982): n is a, c, g, or t
  misc_feature (984)..(984): n is a, c, g, or t
  misc_feature (987)..(987): n is a, c, g, or t
  misc_feature (990)..(992): n is a, c, g, or t
  misc_feature (994)..(994): n is a, c, g, or t
  misc_feature (1000)..(1000): n is a, c, g, or t
  misc_feature (1004)..(1004): n is a, c, g, or t
  misc_feature (1006)..(1006): n is a, c, g, or t
  misc_feature (1017)..(1017): n is a, c, g, or t
  misc_feature (1019)..(1023): n is a, c, g, or t
  misc_feature (1026)..(1027): n is a, c, g, or t
  misc_feature (1031)..(1031): n is a, c, g, or t
  misc_feature (1035)..(1035): n is a, c, g, or t
  misc_feature (1038)..(1039): n is a, c, g, or t
  misc_feature (1051)..(1052): n is a, c, g, or t
  misc_feature (1056)..(1056): n is a, c, g, or t
  misc_feature (1064)..(1064): n is a, c, g, or t
  misc_feature (1066)..(1066): n is a, c, g, or t
  misc_feature (1073)..(1073): n is a, c, g, or t
  misc_feature (1080)..(1080): n is a, c, g, or t
  misc_feature (1088)..(1088): n is a, c, g, or t
  misc_feature (1093)..(1093): n is a, c, g, or t
  misc_feature (1102)..(1102): n is a, c, g, or t
  misc_feature (1112)..(1113): n is a, c, g, or t
  misc_feature (1124)..(1126): n is a, c, g, or t
  misc_feature (1130)..(1130): n is a, c, g, or t
  misc_feature (1144)..(1144): n is a, c, g, or t
  misc_feature (1148)..(1148): n is a, c, g, or t
  misc_feature (1152)..(1154): n is a, c, g, or t
  misc_feature (1159)..(1159): n is a, c, g, or t
  misc_feature (1168)..(1169): n is a, c, g, or t
  misc_feature (1176)..(1179): n is a, c, g, or t
  misc_feature (1183)..(1184): n is a, c, g, or t
  misc_feature (1194)..(1194): n is a, c, g, or t
  misc_feature (1199)..(1199): n is a, c, g, or t
  misc_feature (1201)..(1202): n is a, c, g, or t
  misc_feature (1208)..(1208): n is a, c, g, or t
  misc_feature (1210)..(1210): n is a, c, g, or t
  misc_feature (1212)..(1212): n is a, c, g, or t
  misc_feature (1219)..(1219): n is a, c, g, or t
  misc_feature (1227)..(1227): n is a, c, g, or t
  misc_feature (1231)..(1231): n is a, c, g, or t
  misc_feature (1233)..(1234): n is a, c, g, or t
  misc_feature (1240)..(1241): n is a, c, g, or t
  misc_feature (1246)..(1246): n is a, c, g, or t
  misc_feature (1251)..(1251): n is a, c, g, or t
  misc_feature (1255)..(1256): n is a, c, g, or t
  misc_feature (1261)..(1262): n is a, c, g, or t
  misc_feature (1265)..(1265): n is a, c, g, or t
  misc_feature (1270)..(1270): n is a, c, g, or t
  misc_feature (1274)..(1274): n is a, c, g, or t
  misc_feature (1276)..(1276): n is a, c, g, or t
  misc_feature (1279)..(1279): n is a, c, g, or t
  misc_feature (1285)..(1286): n is a, c, g, or t
  misc_feature (1299)..(1300): n is a, c, g, or t
  misc_feature (1307)..(1307): n is a, c, g, or t
  misc_feature (1310)..(1310): n is a, c, g, or t
  misc_feature (1323)..(1323): n is a, c, g, or t
  misc_feature (1325)..(1326): n is a, c, g, or t
  misc_feature (1328)..(1329): n is a, c, g, or t
  misc_feature (1337)..(1338): n is a, c, g, or t
  misc_feature (1340)..(1340): n is a, c, g, or t
  misc_feature (1343)..(1343): n is a, c, g, or t
  misc_feature (1352)..(1352): n is a, c, g, or t
  misc_feature (1355)..(1355): n is a, c, g, or t
  misc_feature (1361)..(1361): n is a, c, g, or t
  misc_feature (1371)..(1371): n is a, c, g, or t
  misc_feature (1376)..(1376): n is a, c, g, or t
  misc_feature (1380)..(1380): n is a, c, g, or t
  misc_feature (1386)..(1387): n is a, c, g, or t
  misc_feature (1389)..(1391): n is a, c, g, or t
  misc_feature (1394)..(1394): n is a, c, g, or t
  misc_feature (1399)..(1399): n is a, c, g, or t
  misc_feature (1401)..(1401): n is a, c, g, or t
  misc_feature (1403)..(1404): n is a, c, g, or t
  misc_feature (1408)..(1410): n is a, c, g, or t
  misc_feature (1412)..(1412): n is a, c, g, or t
  misc_feature (1419)..(1419): n is a, c, g, or t
  misc_feature (1422)..(1423): n is a, c, g, or t
  misc_feature (1428)..(1428): n is a, c, g, or t
  misc_feature (1431)..(1431): n is a, c, g, or t
  misc_feature (1434)..(1434): n is a, c, g, or t
  misc_feature (1437)..(1437): n is a, c, g, or t
  misc_feature (1439)..(1439): n is a, c, g, or t
  misc_feature (1441)..(1441): n is a, c, g, or t
  misc_feature (1444)..(1444): n is a, c, g, or t
  misc_feature (1446)..(1447): n is a, c, g, or t
  misc_feature (1449)..(1451): n is a, c, g, or t
  misc_feature (1453)..(1453): n is a, c, g, or t
  misc_feature (1455)..(1456): n is a, c, g, or t
  misc_feature (1458)..(1458): n is a, c, g, or t
  misc_feature (1466)..(1466): n is a, c, g, or t
  misc_feature (1469)..(1469): n is a, c, g, or t
  misc_feature (1472)..(1472): n is a, c, g, or t
  misc_feature (1478)..(1479): n is a, c, g, or t
  misc_feature (1482)..(1483): n is a, c, g, or t
  misc_feature (1486)..(1486): n is a, c, g, or t
  misc_feature (1489)..(1489): n is a, c, g, or t
  misc_feature (1500)..(1500): n is a, c, g, or t
  misc_feature (1506)..(1506): n is a, c, g, or t
  misc_feature (1510)..(1510): n is a, c, g, or t
  misc_feature (1514)..(1515): n is a, c, g, or t
  misc_feature (1519)..(1519): n is a, c, g, or t
  misc_feature (1526)..(1526): n is a, c, g, or t
aaaaaaaaataaattactattaanaggatcgcntncccatcaccatcacggatcntatttangtganantnnaacaatcgtngacccacncnctccggtgggggcnggtgtcccctgngngngngtgagtgtgcgtgtgngtgtnganncncngnnnngtgtttcaatngagnnntngggtcatgggcnncnncgcctgacntnnnnnattgccgtnctcnngtgtctactacaaagganntgggggnggncggtganctccgcatccctcaganctcccatggacctngctgcnntaggcncaccnnnatcnccttgtcactcggtggnannnntctcntncantcctggnannacggtnaaantttgatanaangcntccggtaaggcanctggctctgnttnatnanttacttccntgntnctgtngagtcanatntgnagnccccctctcnntgnntnaagcctntnnanaanacnnnncngnancccanngntggtntttggnttangccnaccctttnnaaanatttattgcctttttgtnnnttaatnttncttcaattnnnncctntgaatnntccnccgntgtgaagtgtncnttcttaaagntcnttttncnannnngtnttcaccctnattaaccnaancncttantttnaatncnngaacnnaaannnntctttttcttcncncgcncaggtataaaaanctcncnnccaaaaanttnccnnnngaaantttaaangaangnnnanatccnggnnnnnttttccgnannnnannttnancccnattnttttnctnnaacttttccncgnngctnaaataanatttnnatttttnnnnccnnnccanngaanttnaaaanancnnnngggaccaattatcnannaannttnanaanaanacntntttncnncaaaaaanaannaancnttttnnccnnnnaaaanccccanatacnaanttgcccnaaacngnctnttnnntnaaaaanaaantnttttttctttntnnnnnccnnatancccntgnngatcaaattttnnaaantatttttntntttacancgcaaanctcatatntgaanaatgtttcntaaccccccnntttttcccctnnngggntattattttttttncgcnaaannncccanaaattttcnntatagcnnnncttnncgaaatcaangttcncnnaaaacnancntgaaaanttctctcncctntnncccccnnaatgnatttntttnnctatnnccntcccnccgntntantgtagnngagttctacgctnntattttnttntacagaaaaatananncnncctctaanntnccnggttctttnttntcctcnctacataatncatcntaanaattanntnnngcntttcntntnnatannngnccctatnaannttttnatnatnttntnanttngnncnnncnannangaagaaanctnccncttctnnatnnctngcnacctttcattnagtganatanattnnctcnacatacngt

SEQ ID NO: 243 - DNA, 256 bp, Homo Sapiens
  misc_feature (2)..(2): n is a, c, g, or t
  misc_feature (4)..(4): n is a, c, g, or t
tnanaggagaattaactatgagaggatcgcatcaccatcaccatcacggatcctatttaggtgacactatagaatcgtcgacccacgcgtccgcccacgcgtccgggcgcggagacgcttctggaaggaacgccgcgatggctgcgcagggagagccccaggtccagttcaaacttgtattggttggtgatggtggtactggaaaaacgaccttcgtgaaacgtcatttgactggtgaatttgagaagaagtatgt

SEQ ID NO: 244 - DNA, 1365 bp, Homo Sapiens
  misc_feature (1)..(2): n is a, c, g, or t
  misc_feature (753)..(753): n is a, c, g, or t
  misc_feature (803)..(803): n is a, c, g, or t
  misc_feature (913)..(913): n is a, c, g, or t
  misc_feature (922)..(922): n is a, c, g, or t
  misc_feature (939)..(939): n is a, c, g, or t
  misc_feature (944)..(944): n is a, c, g, or t
  misc_feature (952)..(952): n is a, c, g, or t
  misc_feature (969)..(969): n is a, c, g, or t
  misc_feature (973)..(973): n is a, c, g, or t
  misc_feature (983)..(983): n is a, c, g, or t
  misc_feature (991)..(992): n is a, c, g, or t
  misc_feature (996)..(996): n is a, c, g, or t
  misc_feature (1010)..(1010): n is a, c, g, or t
  misc_feature (1022)..(1022): n is a, c, g, or t
  misc_feature (1025)..(1025): n is a, c, g, or t
  misc_feature (1027)..(1027): n is a, c, g, or t
  misc_feature (1039)..(1039): n is a, c, g, or t
  misc_feature (1046)..(1046): n is a, c, g, or t
  misc_feature (1048)..(1048): n is a, c, g, or t
  misc_feature (1059)..(1059): n is a, c, g, or t
  misc_feature (1063)..(1063): n is a, c, g, or t
  misc_feature (1072)..(1072): n is a, c, g, or t
  misc_feature (1077)..(1077): n is a, c, g, or t
  misc_feature (1079)..(1079): n is a, c, g, or t
  misc_feature (1088)..(1088): n is a, c, g, or t
  misc_feature (1090)..(1090): n is a, c, g, or t
  misc_feature (1096)..(1096): n is a, c, g, or t
  misc_feature (1102)..(1102): n is a, c, g, or t
  misc_feature (1104)..(1104): n is a, c, g, or t
  misc_feature (1113)..(1113): n is a, c, g, or t
  misc_feature (1129)..(1129): n is a, c, g, or t
  misc_feature (1133)..(1134): n is a, c, g, or t
  misc_feature (1139)..(1139): n is a, c, g, or t
  misc_feature (1149)..(1149): n is a, c, g, or t
  misc_feature (1157)..(1157): n is a, c, g, or t
  misc_feature (1160)..(1160): n is a, c, g, or t
  misc_feature (1170)..(1171): n is a, c, g, or t
  misc_feature (1178)..(1178): n is a, c, g, or t
  misc_feature (1184)..(1184): n is a, c, g, or t
  misc_feature (1188)..(1188): n is a, c, g, or t
  misc_feature (1190)..(1190): n is a, c, g, or t
  misc_feature (1197)..(1197): n is a, c, g, or t
  misc_feature (1208)..(1210): n is a, c, g, or t
  misc_feature (1214)..(1214): n is a, c, g, or t
  misc_feature (1228)..(1228): n is a, c, g, or t
  misc_feature (1234)..(1234): n is a, c, g, or t
  misc_feature (1239)..(1239): n is a, c, g, or t
  misc_feature (1243)..(1243): n is a, c, g, or t
  misc_feature (1251)..(1251): n is a, c, g, or t
  misc_feature (1256)..(1256): n is a, c, g, or t
  misc_feature (1259)..(1259): n is a, c, g, or t
  misc_feature (1261)..(1261): n is a, c, g, or t
  misc_feature (1268)..(1268): n is a, c, g, or t
  misc_feature (1274)..(1274): n is a, c, g, or t
  misc_feature (1285)..(1286): n is a, c, g, or t
  misc_feature (1289)..(1289): n is a, c, g, or t
  misc_feature (1291)..(1291): n is a, c, g, or t
  misc_feature (1297)..(1297): n is a, c, g, or t
  misc_feature (1304)..(1304): n is a, c, g, or t
  misc_feature (1323)..(1323): n is a, c, g, or t
  misc_feature (1327)..(1328): n is a, c, g, or t
  misc_feature (1334)..(1334): n is a, c, g, or t
  misc_feature (1337)..(1337): n is a, c, g, or t
  misc_feature (1339)..(1342): n is a, c, g, or t
  misc_feature (1347)..(1363): n is a, c, g, or t
nntagagagattactatgagaggatcgcatcaccatcaccatcacggatcctatttaggtgacactatagaatcgtcgacccacgcgtccgggacaagcccacgtggggtcctccctgcgtgctcagagggtctgtccagccctgggaagcgaccttggcctcagttcacagcctggtgctcatctgctggcaccgggcatccacccatcagcccccgccctgtccctccgaaggacacccagcaggcaccccccggggaggcaggggcagaggtcagaaggggtgtctgggacctggatggccagcagggacaggggcattgtcatctcaaaggcccaacccccagaggccacaccagtcctcccagggagtcctcgagtcgccctgcccagagccctggcaccagagacgccaagagcctgtggggtgactcggagcagcaggtgtggccccgggcgggcggcaccgcgtccagggcagcctccctccgctgagtgacacgggacaccagtgcccggccgacgcgcctttgcaggagaaatgtgcaaacctctgtggataccatttcatttccattcttgtgttgtctccaaggcccttttggagatatacttggtgttggttgtgttttttggttccttttcagagaactgtaaaccgaggctgacgtgctccactgactgtgccgaggggcgggggcaggaggacggcaagacctatttataatatttagcgaactcggtctccctcanatcccccgcgagggaggctgctggacccaccccgctgtcccccatgatanaagtctgtaaataccttggtgaccaatgccccacttcccctcctgggtcacctctgatggctgctgtccactgaaaacgtgggcagtgtccaaattcctgtactgtaaanactaaaagngtttgctctgaaatganaaggngaaacttncatgtgtttcctgccangttntgtcccctangccatccnnaaangtcccgtttccccnaaaactggtcantgnanactcccattgcnatggggncntttaccatggnattntttccaaanccttnantcccccccnanaaaggncctgcnanctccccctnatttcggggttaatcnttcnnctgtncccaaccatntcattttntgncaaatttttnnaaaaaanaaatgnaacntnggtttanttccccaagannnttcnttttccccccgggnttgggngaaanaaanccaaaaanggttnttncnaaaaaangggggntttaaaaaaannctngnccaaantttttcnttttccccacccccccccntttnntttttnttngnnnnaaaannnnnnnnnnnnnnnnngg

SEQ ID NO: 245 - DNA, 1417 bp, Homo Sapiens
  misc_feature (728)..(729): n is a, c, g, or t
  misc_feature (738)..(739): n is a, c, g, or t
  misc_feature (743)..(748): n is a, c, g, or t
  misc_feature (750)..(791): n is a, c, g, or t
  misc_feature (811)..(811): n is a, c, g, or t
  misc_feature (838)..(838): n is a, c, g, or t
  misc_feature (855)..(855): n is a, c, g, or t
  misc_feature (857)..(857): n is a, c, g, or t
  misc_feature (864)..(864): n is a, c, g, or t
  misc_feature (912)..(912): n is a, c, g, or t
  misc_feature (931)..(931): n is a, c, g, or t
  misc_feature (953)..(953): n is a, c, g, or t
  misc_feature (963)..(963): n is a, c, g, or t
  misc_feature (969)..(969): n is a, c, g, or t
  misc_feature (975)..(975): n is a, c, g, or t
  misc_feature (978)..(978): n is a, c, g, or t
  misc_feature (989)..(989): n is a, c, g, or t
  misc_feature (1006)..(1006): n is a, c, g, or t
  misc_feature (1032)..(1032): n is a, c, g, or t
  misc_feature (1035)..(1037): n is a, c, g, or t
  misc_feature (1040)..(1041): n is a, c, g, or t
  misc_feature (1050)..(1050): n is a, c, g, or t
  misc_feature (1060)..(1061): n is a, c, g, or t
  misc_feature (1067)..(1068): n is a, c, g, or t
  misc_feature (1076)..(1076): n is a, c, g, or t
  misc_feature (1079)..(1079): n is a, c, g, or t
  misc_feature (1092)..(1092): n is a, c, g, or t
  misc_feature (1101)..(1102): n is a, c, g, or t
  misc_feature (1108)..(1108): n is a, c, g, or t
  misc_feature (1117)..(1117): n is a, c, g, or t
  misc_feature (1125)..(1125): n is a, c, g, or t
  misc_feature (1132)..(1133): n is a, c, g, or t
  misc_feature (1143)..(1143): n is a, c, g, or t
  misc_feature (1146)..(1146): n is a, c, g, or t
  misc_feature (1149)..(1150): n is a, c, g, or t
  misc_feature (1152)..(1152): n is a, c, g, or t
  misc_feature (1158)..(1158): n is a, c, g, or t
  misc_feature (1160)..(1160): n is a, c, g, or t
  misc_feature (1163)..(1163): n is a, c, g, or t
  misc_feature (1168)..(1169): n is a, c, g, or t
  misc_feature (1185)..(1185): n is a, c, g, or t
  misc_feature (1187)..(1187): n is a, c, g, or t
  misc_feature (1191)..(1191): n is a, c, g, or t
  misc_feature (1194)..(1194): n is a, c, g, or t
  misc_feature (1196)..(1197): n is a, c, g, or t
  misc_feature (1204)..(1204): n is a, c, g, or t
  misc_feature (1211)..(1211): n is a, c, g, or t
  misc_feature (1216)..(1216): n is a, c, g, or t
  misc_feature (1219)..(1219): n is a, c, g, or t
  misc_feature (1229)..(1229): n is a, c, g, or t
  misc_feature (1231)..(1231): n is a, c, g, or t
  misc_feature (1243)..(1243): n is a, c, g, or t
  misc_feature (1247)..(1248): n is a, c, g, or t
  misc_feature (1262)..(1262): n is a, c, g, or t
  misc_feature (1268)..(1268): n is a, c, g, or t
  misc_feature (1286)..(1286): n is a, c, g, or t
  misc_feature (1301)..(1301): n is a, c, g, or t
  misc_feature (1319)..(1319): n is a, c, g, or t
  misc_feature (1327)..(1327): n is a, c, g, or t
  misc_feature (1349)..(1349): n is a, c, g, or t
  misc_feature (1357)..(1357): n is a, c, g, or t
  misc_feature (1361)..(1362): n is a, c, g, or t
  misc_feature (1371)..(1371): n is a, c, g, or t
  misc_feature (1379)..(1379): n is a, c, g, or t
  misc_feature (1384)..(1384): n is a, c, g, or t
  misc_feature (1387)..(1387): n is a, c, g, or t
  misc_feature (1395)..(1395): n is a, c, g, or t
  misc_feature (1397)..(1397): n is a, c, g, or t
  misc_feature (1399)..(1400): n is a, c, g, or t
  misc_feature (1402)..(1402): n is a, c, g, or t
  misc_feature (1406)..(1406): n is a, c, g, or t
  misc_feature (1415)..(1415): n is a, c, g, or t
  misc_feature (1417)..(1417): n is a, c, g, or t
attagagaaattactatgagaggatcgcatcaccatcaccatcacggatcctatttaggtgacactatagaatcgtcgacccacgcgtccggcagcctcccccttgagccccctcgcttcccgacgttccgttcccccctgcccgccttctcccgccaccgccgccgccgccttccgcaggccgtttccaccgaggaaaaggaatcgtatcgtatgtccgctatccagaacctccactctttcgacccctttgctgatgcaagtaagggtgatgacctgcttcctgctggcactgaggattatatccatataagaattcaacagagaaacggcaggaagacccttactactgtccaagggatcgctgatgattacgataaaaagaaactagtgaaggcgtttaagaaaaagtttgcctgcaatggtactgtaattgagcatccggaatatggagaagtaattcagctacagggtgaccaacgcaagaacatatgccagttcctcgtagagattggactggctaaggacgatcagctgaaggttcatgggttttaagtgcttgtggctcactgaagcttaagtgaggatttccttgcaatgagtagaatttcccttctctcccttgtcacaggtttaaaaacctcacagcttgtataatgtaaccatttggggtccgcttttaacttggactagtgtaactccttcatgcaataaactgaaaagagccnnaaaaaaaannaaannnnnnannnnnnnnnnnnnnnnnnnnnnnnnnnnnnnnnnnnnnnnnngggcggccgctccctatagngagtcgtattaagcttaattagctgancttggactcctgttgananatccagnaatgacctcaaaactccatctggatttgttcaaaacgctcggttgccnccgggggttttttattggngaaaatccaagctagcttgggngaaattttcnggagcntaaggnaanctaaaatgganaaaaaaatccctggganaaacccccggttgaaaatatcccaanggnnntcnnaaaaaaaanttttgaaggnntttcanncagttgcncanggacctaaaaccnaaaccgttnngctggnaaattacgncctttttnaaaaacnngaaaaaaaanaanccnnantttttncnggnctttnnttcattttttgccccncngaanaangnncccccgnaattttnatggnaanaaaaaagggnancgggggaaaggnaaanntccccttttaaccnttttcngaaaaaaaaaaatttttncccctggaagaaacnaaaattttggggtttttnaaatttcnaaaggggggtttggaaaccccnttccaggntttnnaaatttttncccccccnggggnttnccttttanangnnanaaanttccccctntn

SEQ ID NO: 246 - DNA, 256 bp, Homo Sapiens
  misc_feature (3)..(3): n is a, c, g, or t
  misc_feature (61)..(61): n is a, c, g, or t
  misc_feature (115)..(116): n is a, c, g, or t
  misc_feature (122)..(122): n is a, c, g, or t
  misc_feature (125)..(125): n is a, c, g, or t
  misc_feature (188)..(188): n is a, c, g, or t
ttntgaggagaattacctatgagaggatcgcatcaccatcaccatcacggatcctatttanttgacactatagaatcgtcgacccacgcgtccggaacaggacccgtctccatgnnccgtgnganccgtggacagaggaagggcgccgggtctgtgttccgcgcgcacgtgaagcaccgtaaaggcgntgcgcgcctgcgcgccgtggatttcgctgagcggcacggctacatcaagggcatcgtcaaggacatca

SEQ ID NO: 247 - DNA, 1198 bp, Homo Sapiens
  misc_feature (866)..(866): n is a, c, g, or t
  misc_feature (992)..(992): n is a, c, g, or t
  misc_feature (994)..(994): n is a, c, g, or t
  misc_feature (1011)..(1011): n is a, c, g, or t
  misc_feature (1016)..(1016): n is a, c, g, or t
  misc_feature (1020)..(1020): n is a, c, g, or t
  misc_feature (1026)..(1027): n is a, c, g, or t
  misc_feature (1029)..(1029): n is a, c, g, or t
  misc_feature (1048)..(1048): n is a, c, g, or t
  misc_feature (1050)..(1050): n is a, c, g, or t
  misc_feature (1057)..(1057): n is a, c, g, or t
  misc_feature (1068)..(1068): n is a, c, g, or t
  misc_feature (1075)..(1075): n is a, c, g, or t
  misc_feature (1077)..(1077): n is a, c, g, or t
  misc_feature (1081)..(1081): n is a, c, g, or t
  misc_feature (1087)..(1087): n is a, c, g, or t
  misc_feature (1095)..(1095): n is a, c, g, or t
  misc_feature (1097)..(1097): n is a, c, g, or t
  misc_feature (1102)..(1102): n is a, c, g, or t
  misc_feature (1110)..(1110): n is a, c, g, or t
  misc_feature (1127)..(1128): n is a, c, g, or t
  misc_feature (1131)..(1131): n is a, c, g, or t
  misc_feature (1133)..(1133): n is a, c, g, or t
  misc_feature (1152)..(1152): n is a, c, g, or t
  misc_feature (1156)..(1156): n is a, c, g, or t
  misc_feature (1170)..(1170): n is a, c, g, or t
  misc_feature (1176)..(1176): n is a, c, g, or t
  misc_feature (1181)..(1181): n is a, c, g, or t
  misc_feature (1183)..(1183): n is a, c, g, or t
  misc_feature (1186)..(1188): n is a, c, g, or t
  misc_feature (1194)..(1194): n is a, c, g, or t
  misc_feature (1198)..(1198): n is a, c, g, or t
tagagaaattactatgagaggatcgcatcaccatcaccatcacggatcctatttaggtgacactatagaatcgtcgacccacgcgtccgctgacatcatccagggcaagctggaccagcgaaaccagctgctggaagtggatttctgcattggccgtgacatccgaaagaaggatatcaataatattgtcaagaccctgcatgaatggtgtgatggctgtgaagcagttctactgggcatcgagcagcaagttctgagagccaaccagtacaaagagaaccacaaccgaactcagcagcaggtagaagcagaggttaccaacatcaagaagacactcaaagccaccgcatcctcctcggctcaggagatggagcagcagctggctgaacgggagtgtccccctcacgctgagcagaggcagcccaccaagaagatgtccaaagtgaaaggtctggtctccagccgccactagggccggctggggcagctggcactcaccaggcctgggtcaggtggggaggggacaccaagggcccatttcctcccctctctacctgcagtgagttccagacctgcccgtcccctcaccagcgcctccccaccctgttggtactgttccagaaaaactgttactccccctcacccactccctccttccccagttgttcccttcagactcaggggctccaccaatgccatcccaaaacagggtcagacactgcccagcttccctccaggaggttcttgtctctgtgtaagggcttgtctccctcccagtttttcttttgctccacgtcattttgtcaggctggttataagccggaggcagctttaaccagcccccagggatgattgtttgaaaggangccccttccccttgtgaaggagggggcactcctctccagcccctggtaccacagtcctcacgaatggtgcagtgatttctagccaggcgtcaagatgcgctgcttttcctctcctgcctcatcccntngttggcagctccatttnagccntggnaagganntnatttttgggcttttttttntnaaacccncgggttttttnccccttnancccncctccnatttccantnttttnaaagggcnggggtgaaaaaccctgnnatntnaaaaaaaaaaaaagggggnttgntttttttgggtggnaaaaangtttntnccnnntggggntttn

SEQ ID NO: 248 - DNA, 256 bp, Homo Sapiens
  misc_feature (5)..(5): n is a, c, g, or t
  misc_feature (8)..(8): n is a, c, g, or t
  misc_feature (31)..(31): n is a, c, g, or t
  misc_feature (38)..(38): n is a, c, g, or t
  misc_feature (41)..(41): n is a, c, g, or t
  misc_feature (49)..(49): n is a, c, g, or t
  misc_feature (52)..(52): n is a, c, g, or t
  misc_feature (54)..(54): n is a, c, g, or t
  misc_feature (58)..(58): n is a, c, g, or t
  misc_feature (62)..(62): n is a, c, g, or t
  misc_feature (65)..(65): n is a, c, g, or t
  misc_feature (79)..(79): n is a, c, g, or t
  misc_feature (84)..(84): n is a, c, g, or t
  misc_feature (88)..(88): n is a, c, g, or t
  misc_feature (98)..(98): n is a, c, g, or t
  misc_feature (101)..(101): n is a, c, g, or t
  misc_feature (103)..(103): n is a, c, g, or t
  misc_feature (106)..(106): n is a, c, g, or t
  misc_feature (109)..(109): n is a, c, g, or t
  misc_feature (112)..(112): n is a, c, g, or t
  misc_feature (117)..(119): n is a, c, g, or t
  misc_feature (128)..(129): n is a, c, g, or t
  misc_feature (136)..(136): n is a, c, g, or t
  misc_feature (140)..(140): n is a, c, g, or t
  misc_feature (142)..(142): n is a, c, g, or t
  misc_feature (144)..(144): n is a, c, g, or t
  misc_feature (154)..(154): n is a, c, g, or t
  misc_feature (162)..(163): n is a, c, g, or t
  misc_feature (173)..(173): n is a, c, g, or t
  misc_feature (181)..(181): n is a, c, g, or t
  misc_feature (186)..(186): n is a, c, g, or t
  misc_feature (191)..(191): n is a, c, g, or t
  misc_feature (194)..(194): n is a, c, g, or t
  misc_feature (196)..(196): n is a, c, g, or t
  misc_feature (200)..(201): n is a, c, g, or t
  misc_feature (203)..(206): n is a, c, g, or t
  misc_feature (216)..(216): n is a, c, g, or t
  misc_feature (221)..(221): n is a, c, g, or t
  misc_feature (225)..(225): n is a, c, g, or t
  misc_feature (242)..(242): n is a, c, g, or t
  misc_feature (253)..(253): n is a, c, g, or t
ggggnaantttttctgtggaggtgcgcgtcncccctcnccntctcgggntcntntttngagngancacatatataatcncgcgncccncgcgctccgnganangtngtntcnctgannngcgagggcnncgagcangcanangnggagtcacangctacacnnacatctccgnttctggtngcacngtgtntangnatgnncnnnnttactcctcntcagntacnatgcggtagagcctganggaatgggaanccg

SEQ ID NO: 249 - DNA, 256 bp, Homo Sapiens
gagaaattaactatgagaggatcgcatcaccatcaccatcacggatcctatttaggtgacactatagaatcgtcgacccacgcgtccggcgggagaaagaggagaatcgcccaagcggcctcggaagtcccagggagtggaggcccccgccgtggagccgtgtggtgtatgtgtggtaacaccatgtctgtgcccctgctcaccgatgctgccaccgtgtctggagctgagcgggaaacggccgcggttatttttt

SEQ ID NO: 250 - DNA, 1131 bp, Homo Sapiens
  misc_feature (890)..(890): n is a, c, g, or t
  misc_feature (901)..(901): n is a, c, g, or t
  misc_feature (912)..(912): n is a, c, g, or t
  misc_feature (927)..(927): n is a, c, g, or t
  misc_feature (938)..(938): n is a, c, g, or t
  misc_feature (959)..(959): n is a, c, g, or t
  misc_feature (961)..(961): n is a, c, g, or t
  misc_feature (968)..(968): n is a, c, g, or t
  misc_feature (972)..(972): n is a, c, g, or t
  misc_feature (977)..(977): n is a, c, g, or t
  misc_feature (1016)..(1016): n is a, c, g, or t
  misc_feature (1022)..(1022): n is a, c, g, or t
  misc_feature (1040)..(1040): n is a, c, g, or t
  misc_feature (1058)..(1058): n is a, c, g, or t
  misc_feature (1065)..(1065): n is a, c, g, or t
  misc_feature (1067)..(1068): n is a, c, g, or t
  misc_feature (1078)..(1078): n is a, c, g, or t
  misc_feature (1085)..(1085): n is a, c, g, or t
  misc_feature (1092)..(1092): n is a, c, g, or t
  misc_feature (1104)..(1104): n is a, c, g, or t
  misc_feature (1118)..(1118): n is a, c, g, or t
  misc_feature (1130)..(1130): n is a, c, g, or t
gagaaattactatgagaggatcgcatcaccatcaccatcacggatcctatttaggtgacactatagaatcgtcgacccacgcgtccgcccacgcgtccgcccacgcgtccgcggacgcgtgggctgcccctgtcccgtttgactttacacataaaaaacaatcaggtggtgcaggccagtatggaaaagtaataggtgtcctggagcctctggacccagaggactacactaaattggaattttcagatgaaacattcggatcaaatattccaaagcagtttgtgcctgctgtagaaaaggggtttttagatgcctgcgagaagggccctctttctggtcacaagctctctgggctccggtttgtcctgcaagatggagcacaccacatggttgattctaatgaaatctctttcatccgagcaggagaaggtgctcttaaacaagccttggcaaatgcaacattatgtattcttgaacctattatggctgtggaagttgtagctccaaatgaatttcagggacaagtaattgcaggaattaaccgacgccatggggtaatcactgggcaagatggagttgaggactattttacactgtatgcagatgtccctctaaatgatatgtttggttattccactgaacttaggtcatgcacagagggaaagggagaatacacaatggagtatagcaggtatcagccatgtttaccatccacacaagaagacgtcattaataagtatttggaagctacaggtcaacttcctgttaaaaaaggaaaagccaagaactaactttgcttactgtgagttgactgactctaattgaatctgcgtggttttgatactttgatggattccagtggaataaattcaggctgctgaaacaagaantctgagccagnagcgggctctnctttcttcaaagaanccttctggtcnatcaggactctgtaatcaagnantcttgcnatcncactnatgatggttaagtatgaaacccaaaattattatatgaangttaanttaggaaaaacattcgtncttaactaagagtcttcnattgacnannttcctaaaancgaaatnaaaaacnactcccctctgnagggtacaaaaatntgcatgtcgcanc

SEQ ID NO: 251 - DNA, 256 bp, Homo Sapiens
ccacagccgagcagctggcccagattgcagcggagaacgaggaggatgagcactcggtcaactacaagcccccggcccagaagagcatccaggagatccaggagctggacaaggacgacgagagcctgcgaaagtacaaggaggccctgctgggccgcgtggccgtttccgcagaccccaacgtccccaacgtcgtggtgactggcctgaccctggtgtgcagctcggccccgggccccctggagctggacctgac

SEQ ID NO: 252 - DNA, 1387 bp, Homo Sapiens
  misc_feature (1)..(1): n is a, c, g, or t
  misc_feature (845)..(845): n is a, c, g, or t
  misc_feature (898)..(898): n is a, c, g, or t
  misc_feature (987)..(987): n is a, c, g, or t
  misc_feature (1016)..(1016): n is a, c, g, or t
  misc_feature (1024)..(1024): n is a, c, g, or t
  misc_feature (1031)..(1032): n is a, c, g, or t
  misc_feature (1044)..(1044): n is a, c, g, or t
  misc_feature (1046)..(1046): n is a, c, g, or t
  misc_feature (1053)..(1053): n is a, c, g, or t
  misc_feature (1060)..(1060): n is a, c, g, or t
  misc_feature (1066)..(1066): n is a, c, g, or t
  misc_feature (1071)..(1071): n is a, c, g, or t
  misc_feature (1079)..(1079): n is a, c, g, or t
  misc_feature (1083)..(1083): n is a, c, g, or t
  misc_feature (1095)..(1095): n is a, c, g, or t
  misc_feature (1100)..(1100): n is a, c, g, or t
  misc_feature (1106)..(1106): n is a, c, g, or t
  misc_feature (1119)..(1119): n is a, c, g, or t
  misc_feature (1125)..(1125): n is a, c, g, or t
  misc_feature (1131)..(1131): n is a, c, g, or t
  misc_feature (1158)..(1158): n is a, c, g, or t
  misc_feature (1164)..(1164): n is a, c, g, or t
  misc_feature (1176)..(1176): n is a, c, g, or t
  misc_feature (1178)..(1179): n is a, c, g, or t
  misc_feature (1184)..(1184): n is a, c, g, or t
  misc_feature (1191)..(1191): n is a, c, g, or t
  misc_feature (1199)..(1199): n is a, c, g, or t
  misc_feature (1202)..(1202): n is a, c, g, or t
  misc_feature (1209)..(1209): n is a, c, g, or t
  misc_feature (1212)..(1213): n is a, c, g, or t
  misc_feature (1219)..(1219): n is a, c, g, or t
  misc_feature (1229)..(1229): n is a, c, g, or t
  misc_feature (1235)..(1236): n is a, c, g, or t
  misc_feature (1239)..(1239): n is a, c, g, or t
  misc_feature (1242)..(1242): n is a, c, g, or t
  misc_feature (1249)..(1249): n is a, c, g, or t
  misc_feature (1263)..(1263): n is a, c, g, or t
  misc_feature (1276)..(1276): n is a, c, g, or t
  misc_feature (1285)..(1285): n is a, c, g, or t
  misc_feature (1289)..(1289): n is a, c, g, or t
  misc_feature (1303)..(1303): n is a, c, g, or t
  misc_feature (1306)..(1306): n is a, c, g, or t
  misc_feature (1314)..(1314): n is a, c, g, or t
  misc_feature (1325)..(1327): n is a, c, g, or t
  misc_feature (1335)..(1338): n is a, c, g, or t
  misc_feature (1340)..(1350): n is a, c, g, or t
  misc_feature (1356)..(1356): n is a, c, g, or t
  misc_feature (1359)..(1359): n is a, c, g, or t
  misc_feature (1364)..(1364): n is a, c, g, or t
  misc_feature (1383)..(1384): n is a, c, g, or t
  misc_feature (1387)..(1387): n is a, c, g, or t
natagagagattactatgagaggatcgcatcaccatcaccatcacggatcctatttaggtgacactatagaatcgtcgacccacgcgtccggggccgggcggtttggccccttagcgcccgggcgtcggggcggtaaaaggccggcagaagggaggcacttgagaaatgtctttcctccaggacccaagtttcttcaccatggggatgtggtccattggtgcaggagccctgggggctgctgccttggcattgctgcttgccaacacagacgtgtttctgtccaagccccagaaagcggccctggagtacctggaggatatagacctgaaaacactggagaaggaaccaaggactttcaaagcaaaggagctatgggaaaaaaatggagctgtgattatggccgtgcggaggccaggctgtttcctctgtcgagaggaagctgcggatctgtcctccctgaaaagcatgttggaccagctgggcgtccccctctatgcagtggtaaaggagcacatcaggactgaagtgaaggatttccagccttatttcaaaggagaaatcttcctggatgaaaagaaaaagttctatggtccacaaaggcggaagatgatgtttatgggatttatccgtctgggagtgtggtacaacttcttccgagcctggaacggaggcttctctggaaacctggaaggagaaggcttcatccttgggggagttttcgtggtgggatcaggaaagcagggcattcttcttgagcaccgagaaaaagaatttggagacaaagtaaacctactttctgttctggaagctgctaagatgatcaaaccacagactttggcctcanagaaaaaatgattgtgtgaaactgcccagctcagggataaccagggacattcncctgtgttcatgggatgtattgtttccactcgtgtcctaaggagtgaaaaacccatttatactctactctcagtatggattattaaggnatttaaaaatccggttaagccccctaagncaaaatanccccaannaaactgaaaaantntgaaaanttattgnggattnttaanctaaaacntggnaaaaggaggctnaaatnactgcnagctgggggcaanggcccnactgtnatccccccttttggaagccaagggaanaatccnttgaggcgggantnnaaacnccctaanaaatgggnaanccccttncannaaaaanaaaaaccccngggggnnggnggnccctgtntcccccccccgggngtgaggggaaacnttaccgggngggnggtggggaaaaacnccngtttcccngggggggactnnnaaaaaaannnnannnnnnnnnnnaaaaanggnccccnaaaaaaaattttttttttnnttn

SEQ ID NO: 253 - DNA, 256 bp, Homo Sapiens
acgagactcgtgccaaacttgatgagctttctgctaagcgagagactagtggagaaaaatccagacaattaagagatgctcagcaggatgcaagagataaaatggaggatatcgaacgccaagttagagaattgaaaacaaaaatttcagctatgaaagaagaaaaagaacagcttagtgctgaaagacaagagcagattaagcagaggactaagttggagcttaaagccaaggatttacaagatgaactagcagg

SEQ ID NO: 254 - DNA, 256 bp, Homo Sapiens
  misc_feature (37)..(37): n is a, c, g, or t
tcgagaaatataaaaattatttgctttgtgagcgganacaatataatagattaattgtgagcggataacaatttacacagaattattaaagaggagaaattaactatgagaggatcgcatcaccatcaccatcacggatcctatttaggtgacactatagaatcgtcgacccacgcgtccgactggttcctgggccaggcaggcagctccatcccatcaacttggccccggttctatgacacccgctacaaccaag

SEQ ID NO: 255 - DNA, 1173 bp, Homo Sapiens
  misc_feature (855)..(855): n is a, c, g, or t
  misc_feature (867)..(867): n is a, c, g, or t
  misc_feature (938)..(938): n is a, c, g, or t
  misc_feature (967)..(967): n is a, c, g, or t
  misc_feature (972)..(972): n is a, c, g, or t
  misc_feature (986)..(986): n is a, c, g, or t
  misc_feature (988)..(988): n is a, c, g, or t
  misc_feature (1014)..(1014): n is a, c, g, or t
  misc_feature (1020)..(1020): n is a, c, g, or t
  misc_feature (1025)..(1025): n is a, c, g, or t
  misc_feature (1033)..(1033): n is a, c, g, or t
  misc_feature (1039)..(1039): n is a, c, g, or t
  misc_feature (1053)..(1053): n is a, c, g, or t
  misc_feature (1058)..(1058): n is a, c, g, or t
  misc_feature (1060)..(1060): n is a, c, g, or t
  misc_feature (1065)..(1065): n is a, c, g, or t
  misc_feature (1085)..(1085): n is a, c, g, or t
  misc_feature (1092)..(1092): n is a, c, g, or t
  misc_feature (1106)..(1106): n is a, c, g, or t
  misc_feature (1112)..(1112): n is a, c, g, or t
  misc_feature (1115)..(1116): n is a, c, g, or t
  misc_feature (1119)..(1119): n is a, c, g, or t
  misc_feature (1127)..(1127): n is a, c, g, or t
  misc_feature (1139)..(1139): n is a, c, g, or t
  misc_feature (1146)..(1147): n is a, c, g, or t
  misc_feature (1154)..(1156): n is a, c, g, or t
  misc_feature (1158)..(1158): n is a, c, g, or t
  misc_feature (1166)..(1166): n is a, c, g, or t
tagagaaattactatgagaggatcgcatcaccatcaccatcacggatcctatttaggtgacactatagaatcgtcgacccacgcgtccgagacagggatggagctgaagactatcaacgactttctcttccagagccagatcgacaacatcaacctgttcaaggtgcagcgatactgtgagaagagcatgatcagcagaaagctctttggcttcactgaacggtacggagcagtgttctcatcccgggagcagcccaaactggctgggtttcagcaattcctgcagagcctgcagcccaggacgactgaagcacttgcagcccctgcagacgagagtcaggccagcgtcccgcaaccagcttccccactgatgcacatcgaaggcttcctggcagctctcactacggccaaccaggacggcagggtcatcctgagccgccaaggcagtctcagtcagagcaccctgaagtttttgctcctgaatccagctgtgcactttgcccaagtggtgaaggaatgccgggcagtggtcattgccggggggaccatgcagccggctgcaggagcagtggagactcctctgctgctccattctgtagccccaggatcacatgtctcccagagaaagctgttctgtggtttcaaactcaaggaaaaaaatcatgattccacttttaaaaggtgtctgacttccggcagcagctgctggcctgtgccggggtggaagctgagcgcgtggtggagttttcctgtggtcacgtgatccctccagacaacatcctgccccttgtcatctgcatcggggtctccaaccagccgctagaattcacgttccagaaaagagacctgcctcanatgatggacgangtgggtcgcatcctctgtaacctgtgcagtgtggtttctggaaggggtggtctgtttcttcccctcctacnagtacctgcgccaggtccatgcccctggnaaaanggtggcctgctggncnatctggctgccagaaaaaaattttcnggaacntaaancgcccccnggtaancaggggctgctggngtatncnagggnatcagggggggcgtctgctnacttggnctgggccagaaaangccccngannggncctgctcnccttgggttggngaaaaanngaagaannntnctgaaacnaggcggg

SEQ ID NO: 256 - DNA, 256 bp, Homo Sapiens
  misc_feature (3)..(4): n is a, c, g, or t
ttnnctatgagaggtcgcatcaccatcaccatcacggatcctatttaggtgacactatagaatcgtcgacccacgcgtccgagaggctgacgcagaatgcagactgtgtggtggtgctggacaacacagccctgaaccggattgccacagaccgcctgcacatccagaacccatccttctcccagatcaaccagctggtgtctaccatcatgtcagccagcaccaccaccctgcgctaccctggctacatgaacaa

SEQ ID NO: 257 - DNA, 1387 bp, Homo Sapiens
  misc_feature (2)..(4): n is a, c, g, or t
  misc_feature (7)..(15): n is a, c, g, or t
  misc_feature (17)..(17): n is a, c, g, or t
  misc_feature (19)..(23): n is a, c, g, or t
  misc_feature (767)..(767): n is a, c, g, or t
  misc_feature (779)..(780): n is a, c, g, or t
  misc_feature (782)..(782): n is a, c, g, or t
  misc_feature (793)..(793): n is a, c, g, or t
  misc_feature (800)..(800): n is a, c, g, or t
  misc_feature (815)..(815): n is a, c, g, or t
  misc_feature (820)..(821): n is a, c, g, or t
  misc_feature (829)..(829): n is a, c, g, or t
  misc_feature (838)..(838): n is a, c, g, or t
  misc_feature (847)..(847): n is a, c, g, or t
  misc_feature (851)..(851): n is a, c, g, or t
  misc_feature (855)..(855): n is a, c, g, or t
  misc_feature (864)..(864): n is a, c, g, or t
  misc_feature (868)..(868): n is a, c, g, or t
  misc_feature (876)..(877): n is a, c, g, or t
  misc_feature (880)..(880): n is a, c, g, or t
  misc_feature (889)..(889): n is a, c, g, or t
  misc_feature (892)..(892): n is a, c, g, or t
  misc_feature (895)..(896): n is a, c, g, or t
  misc_feature (898)..(898): n is a, c, g, or t
  misc_feature (902)..(903): n is a, c, g, or t
  misc_feature (906)..(908): n is a, c, g, or t
  misc_feature (911)..(911): n is a, c, g, or t
  misc_feature (913)..(914): n is a, c, g, or t
  misc_feature (918)..(918): n is a, c, g, or t
  misc_feature (923)..(923): n is a, c, g, or t
  misc_feature (932)..(932): n is a, c, g, or t
  misc_feature (936)..(936): n is a, c, g, or t
  misc_feature (943)..(943): n is a, c, g, or t
  misc_feature (948)..(948): n is a, c, g, or t
  misc_feature (953)..(954): n is a, c, g, or t
  misc_feature (956)..(958): n is a, c, g, or t
  misc_feature (960)..(960): n is a, c, g, or t
  misc_feature (963)..(963): n is a, c, g, or t
  misc_feature (970)..(970): n is a, c, g, or t
  misc_feature (972)..(974): n is a, c, g, or t
  misc_feature (979)..(984): n is a, c, g, or t
  misc_feature (989)..(989): n is a, c, g, or t
  misc_feature (993)..(993): n is a, c, g, or t
  misc_feature (996)..(997): n is a, c, g, or t
  misc_feature (1000)..(1002): n is a, c, g, or t
  misc_feature (1004)..(1004): n is a, c, g, or t
  misc_feature (1007)..(1008): n is a, c, g, or t
  misc_feature (1010)..(1016): n is a, c, g, or t
  misc_feature (1019)..(1019): n is a, c, g, or t
  misc_feature (1024)..(1024): n is a, c, g, or t
  misc_feature (1028)..(1029): n is a, c, g, or t
  misc_feature (1033)..(1037): n is a, c, g, or t
  misc_feature (1042)..(1045): n is a, c, g, or t
  misc_feature (1047)..(1048): n is a, c, g, or t
  misc_feature (1050)..(1051): n is a, c, g, or t
  misc_feature (1053)..(1056): n is a, c, g, or t
  misc_feature (1061)..(1065): n is a, c, g, or t
  misc_feature (1069)..(1069): n is a, c, g, or t
  misc_feature (1071)..(1073): n is a, c, g, or t
  misc_feature (1076)..(1080): n is a, c, g, or t
  misc_feature (1082)..(1084): n is a, c, g, or t
  misc_feature (1086)..(1087): n is a, c, g, or t
  misc_feature (1089)..(1089): n is a, c, g, or t
  misc_feature (1092)..(1092): n is a, c, g, or t
  misc_feature (1095)..(1095): n is a, c, g, or t
  misc_feature (1098)..(1098): n is a, c, g, or t
  misc_feature (1101)..(1102): n is a, c, g, or t
  misc_feature (1104)..(1107): n is a, c, g, or t
  misc_feature (1109)..(1109): n is a, c, g, or t
  misc_feature (1112)..(1113): n is a, c, g, or t
  misc_feature (1115)..(1118): n is a, c, g, or t
  misc_feature (1120)..(1126): n is a, c, g, or t
  misc_feature (1128)..(1139): n is a, c, g, or t
  misc_feature (1142)..(1144): n is a, c, g, or t
  misc_feature (1146)..(1148): n is a, c, g, or t
  misc_feature (1152)..(1155): n is a, c, g, or t
  misc_feature (1158)..(1164): n is a, c, g, or t
  misc_feature (1167)..(1167): n is a, c, g, or t
  misc_feature (1169)..(1169): n is a, c, g, or t
  misc_feature (1172)..(1173): n is a, c, g, or t
  misc_feature (1175)..(1187): n is a, c, g, or t
  misc_feature (1189)..(1192): n is a, c, g, or t
  misc_feature (1194)..(1194): n is a, c, g, or t
  misc_feature (1198)..(1203): n is a, c, g, or t
  misc_feature (1205)..(1205): n is a, c, g, or t
  misc_feature (1207)..(1215): n is a, c, g, or t
  misc_feature (1217)..(1235): n is a, c, g, or t
  misc_feature (1237)..(1243): n is a, c, g, or t
  misc_feature (1246)..(1249): n is a, c, g, or t
  misc_feature (1251)..(1258): n is a, c, g, or t
  misc_feature (1260)..(1261): n is a, c, g, or t
  misc_feature (1263)..(1266): n is a, c, g, or t
  misc_feature (1269)..(1270): n is a, c, g, or t
  misc_feature (1272)..(1280): n is a, c, g, or t
  misc_feature (1284)..(1287): n is a, c, g, or t
  misc_feature (1289)..(1291): n is a, c, g, or t
  misc_feature (1293)..(1302): n is a, c, g, or t
  misc_feature (1304)..(1305): n is a, c, g, or t
  misc_feature (1307)..(1312): n is a, c, g, or t
  misc_feature (1314)..(1332): n is a, c, g, or t
  misc_feature (1334)..(1352): n is a, c, g, or t
  misc_feature (1354)..(1360): n is a, c, g, or t
  misc_feature (1362)..(1363): n is a, c, g, or t
  misc_feature (1365)..(1367): n is a, c, g, or t
  misc_feature (1369)..(1371): n is a, c, g, or t
  misc_feature (1373)..(1378): n is a, c, g, or t
  misc_feature (1380)..(1386): n is a, c, g, or t
annnaannnnnnnnncntnnnnntcccatcacggatcctatttaggtgacactatagaatcgtcgacccacgcgtccggctctcagctggctcttgtctcgcccttttgttttatttcggaggcttgcagtttagggcatcgaggagccacagccggagagaagaacacagcggtaggaatggcttgcaccaccccagtccggatcatttctggccccgcttcccggacgctctgcgccccttcgttccttgggatcaattggaaaacgaggattccagcgtgcacatttccccccggcagaagcgagatgccaactccagcatctacaaaggcaagaagtgccgcatggagtcctgcttcgatttcaccctttgcaagaaaaacggcttcaaagtctacgtatacccacagcaaaaaggggagaaaatcgccgaaagttaccaaaacattctagcggccatcgagggctccaggttctacacctcggaccccagccaggcgtgcctctttgtcctgagtctggatactttagacagagaccagttgtcacctcagtatgtgcacaatttgagatccaaagtgcagagtctccacttgtggaacaatggtaggaatcatttaatttttaatttatattccggcacttggcctgactacaccgaggacgtggggtttgacatcggccaggcgatgctggccaaagccagcatcagtactgaaaaacttccgacccaactttgatgtttctattcccctcttttctaangatcatccccannanaggaagggganagggggntttttgaagttcaanaccannccttcctntcaggaaanaacatgctnggtnttcnaggggaaanaagntacttgannggnaaaggatcnaanccnngnatgnnttnnnttncnntccnttaanggggaagangttntgctccnccccncctgnnannnanggnaaaaatngnnnaaaannnnnngattncttnctnngannnanaannannnnnnnttntaaantatnntttnnnnnaaatnnnnannanngnnnnttttnnnnngttncnnnggnnnnnannntnngnctntanaantcnngnnnntnttnngnnnncnnnnnnncnnnnnnnnnnnnaannngnnnaatnnnnttnnnnnnnatnanttnnannnnnnnnnnnnnannnnanaaannnnnnanannnnnnnnntnnnnnnnnnnnnnnnnnnnannnnnnntannnnannnnnnnngnngnnnnttnntnnnnnnnnntatnnnnannntnnnnnnnnnnanntnnnnnntnnnnnnnnnnnnnnnnnnnannnnnnnnnnnnnnnnnnntnnnnnnnanntnnntnnnannnnnnannnnnnna

SEQ ID NO: 258 - DNA, 1238 bp, Homo Sapiens
  misc_feature (2)..(2): n is a, c, g, or t
  misc_feature (6)..(6): n is a, c, g, or t
  misc_feature (683)..(684): n is a, c, g, or t
  misc_feature (686)..(687): n is a, c, g, or t
  misc_feature (689)..(689): n is a, c, g, or t
  misc_feature (691)..(691): n is a, c, g, or t
  misc_feature (695)..(695): n is a, c, g, or t
  misc_feature (701)..(704): n is a, c, g, or t
  misc_feature (706)..(715): n is a, c, g, or t
  misc_feature (718)..(719): n is a, c, g, or t
  misc_feature (722)..(722): n is a, c, g, or t
  misc_feature (724)..(724): n is a, c, g, or t
  misc_feature (726)..(726): n is a, c, g, or t
  misc_feature (729)..(732): n is a, c, g, or t
  misc_feature (740)..(742): n is a, c, g, or t
  misc_feature (744)..(744): n is a, c, g, or t
  misc_feature (765)..(765): n is a, c, g, or t
  misc_feature (800)..(800): n is a, c, g, or t
  misc_feature (832)..(832): n is a, c, g, or t
  misc_feature (866)..(866): n is a, c, g, or t
  misc_feature (886)..(886): n is a, c, g, or t
  misc_feature (889)..(889): n is a, c, g, or t
  misc_feature (891)..(891): n is a, c, g, or t
  misc_feature (910)..(910): n is a, c, g, or t
  misc_feature (950)..(950): n is a, c, g, or t
  misc_feature (960)..(961): n is a, c, g, or t
  misc_feature (963)..(963): n is a, c, g, or t
  misc_feature (965)..(965): n is a, c, g, or t
  misc_feature (976)..(976): n is a, c, g, or t
  misc_feature (978)..(978): n is a, c, g, or t
  misc_feature (980)..(980): n is a, c, g, or t
  misc_feature (986)..(986): n is a, c, g, or t
  misc_feature (993)..(994): n is a, c, g, or t
  misc_feature (1002)..(1002): n is a, c, g, or t
  misc_feature (1004)..(1004): n is a, c, g, or t
  misc_feature (1014)..(1014): n is a, c, g, or t
  misc_feature (1017)..(1017): n is a, c, g, or t
  misc_feature (1021)..(1021): n is a, c, g, or t
  misc_feature (1025)..(1025): n is a, c, g, or t
  misc_feature (1065)..(1065): n is a, c, g, or t
  misc_feature (1072)..(1072): n is a, c, g, or t
  misc_feature (1080)..(1080): n is a, c, g, or t
  misc_feature (1098)..(1098): n is a, c, g, or t
  misc_feature (1104)..(1104): n is a, c, g, or t
  misc_feature (1132)..(1132): n is a, c, g, or t
  misc_feature (1134)..(1134): n is a, c, g, or t
  misc_feature (1137)..(1137): n is a, c, g, or t
  misc_feature (1141)..(1141): n is a, c, g, or t
  misc_feature (1145)..(1147): n is a, c, g, or t
  misc_feature (1149)..(1149): n is a, c, g, or t
  misc_feature (1151)..(1151): n is a, c, g, or t
  misc_feature (1158)..(1158): n is a, c, g, or t
  misc_feature (1166)..(1166): n is a, c, g, or t
  misc_feature (1168)..(1168): n is a, c, g, or t
  misc_feature (1175)..(1175): n is a, c, g, or t
  misc_feature (1179)..(1179): n is a, c, g, or t
  misc_feature (1190)..(1190): n is a, c, g, or t
  misc_feature (1201)..(1201): n is a, c, g, or t
  misc_feature (1207)..(1207): n is a, c, g, or t
  misc_feature (1218)..(1218): n is a, c, g, or t
  misc_feature (1220)..(1220): n is a, c, g, or t
anaatngagaaaattactatgagaggatcgcatcaccatcaccatcacggatcctatttaggtgacactatagaatcgtcgacccacgcgtccgtggcttctcatcgtctgctcctcctctgccttgctggactggtatttgtgtctgaggctggccctacgggcaccggtgaatccaagtgtcctctgatggtcaaagttctagatgctgtccgaggcagtcctgccatcaatgtggccgtgcatgtgttcagaaaggctgctgatgacacctgggagccatttgcctctgggaaaaccagtgagtctggagagctgcatgggctcacaactgaggaggaatttgtagaagggatatacaaagtggaaatagacaccaaatcttactggaaggcacttggcatctccccattccatgagcatgcagaggtggtattcacagccaacgactccggcccccgccgctacaccattgccgccctgctgagcccctactcctattccaccacggctgtcgtcaccaatcccaaggaatgagggacttctcctccagtggacctgaaggacgagggatgggatttcatgtaaccaagagtattccatttttactaaagcagtgttttcacctcatatgctatgttagaagtccaggcagagacaataaaacattcctgtgaaaggcnnannananaaanaaaaannnnannnnnnnnnnaannaanananaannnnaaaaaaannnanggggcggccgctccctatagngagtcgtattaagcttaattagctgaacttggacncctgttgaaaatccagtaatgacctcaaaacnccatctggatttgttcaaaaacgctcggttgccnccgggcgttttttatggggnganantccaagctagctgggcganattttcaggagctaagggaagctaaaatggaaaaaaaaantccctgggannancncccgtttgaantntncccaanggcatcnnaaaaaaananttttgaggcnttncagncagntgctccaatggacctaaaaccaaacgttcacctggaaatnacggccntttttaanaccggaaaaaaaaaaaancccaantttttccgggctttttttcaatttttgncnccngaanaagnnncncngaaattnctttgggnanaaaaaangggnactggggaatnggaaaagtttncccttnttaaccgtttncnaagaaaaaataaactttt

SEQ ID NO: 259 - DNA, 256 bp, Homo Sapiens
  misc_feature (2)..(2): n is a, c, g, or t
tnagaggagaattaactatgagaggatcgcatcaccatcaccatcacggatcctatttaggtgacactatagaatcgtcgacccacgcgtccgcccacgcgtccgcgtcgccgccatcctcggcgcgactcgcttctttcggttctacctgggagaatccaccgccatccgccaccatggtgaacttcacggtagaccagatccgcgccatcatggacaagaaggccaacatccgcaacatgtctgtcatcgccca

SEQ ID NO: 260 - DNA, 1200 bp, Homo Sapiens
  misc_feature (920)..(920): n is a, c, g, or t
  misc_feature (950)..(950): n is a, c, g, or t
  misc_feature (988)..(988): n is a, c, g, or t
  misc_feature (996)..(996): n is a, c, g, or t
  misc_feature (1034)..(1034): n is a, c, g, or t
  misc_feature (1036)..(1036): n is a, c, g, or t
  misc_feature (1038)..(1038): n is a, c, g, or t
  misc_feature (1042)..(1042): n is a, c, g, or t
  misc_feature (1044)..(1044): n is a, c, g, or t
  misc_feature (1053)..(1053): n is a, c, g, or t
  misc_feature (1062)..(1063): n is a, c, g, or t
  misc_feature (1070)..(1070): n is a, c, g, or t
  misc_feature (1073)..(1073): n is a, c, g, or t
  misc_feature (1077)..(1077): n is a, c, g, or t
  misc_feature (1080)..(1080): n is a, c, g, or t
  misc_feature (1085)..(1085): n is a, c, g, or t
  misc_feature (1097)..(1098): n is a, c, g, or t
  misc_feature (1105)..(1105): n is a, c, g, or t
  misc_feature (1124)..(1124): n is a, c, g, or t
  misc_feature (1130)..(1130): n is a, c, g, or t
  misc_feature (1137)..(1137): n is a, c, g, or t
  misc_feature (1141)..(1141): n is a, c, g, or t
  misc_feature (1145)..(1145): n is a, c, g, or t
  misc_feature (1148)..(1148): n is a, c, g, or t
  misc_feature (1154)..(1154): n is a, c, g, or t
  misc_feature (1164)..(1164): n is a, c, g, or t
  misc_feature (1174)..(1174): n is a, c, g, or t
  misc_feature (1178)..(1178): n is a, c, g, or t
  misc_feature (1182)..(1182): n is a, c, g, or t
  misc_feature (1190)..(1190): n is a, c, g, or t
tagagaaaattactatgagaggatcgcatcaccatcaccatcacggatcctatttaggtgacactatagaatcgtcgacccacgcgtccgcatccaaacccctgacagccctgtcagataagagaccaaactatggggaaatccctgttcaagagcatctgttaagaacatcttcagccagccggcctgcttccctgccaagagtgcctgcgatggaaagtgccaagaccctctcagtgtctcgacgaagtagtgaagaaatgaaacgggacatttctgcacaggagggagcgtcgccagcctctctgatggctatgggaaccacgtctccacagctttccctgtcctcttctccaacggcatctgtgactcccaccacccgaagccgaataagagaagaaaggaaagaccctctctcagcattggccagagaatatggaggatcaaagaggaacgccttgctgaagtggtgtcagaagaaaacagaaggctatcagaatattgacattacaaacttcagcagcagctggaatgatgggctggccttctgtgccctcctgcatacatatctccctgcccacattccatatcaagaactgaacagccaggataagagaaggaacttcatgctggctttccaggcagctgaaagtgtcggcatcaaatccacactggacattaatgaaatggtacggactgaacgacccgactggcagaacgtgatgctgtatgtgacggcgatctacaagtactttgagacctgagcatgccgggaggagccgccccaatagcgggggtacccctccacagcgaccgagcgacaccgacgccattagctacgcacccctgtaaagcttccagcaactctgggctgcccccacagcgtgtgagcctccagctcggggcttccgtattggaanaactcagccgtggggcccacagctcccacnagggcccctcccacatgacccgtccattcaggtcatgngggctcancaaacatcctgcaggccgggggctgctggaattttccntntngaananaatattganctaccctanngctcccnggncccnaanaaaangggctcttgccnngctgaantttgggaaaagggattccnttctgnggggaancccnctanggnttaaanaaaggctcgnccccggcccnttcnggantattgggntggggggggt

SEQ ID NO: 261 - DNA, 256 bp, Homo Sapiens
  misc_feature (2)..(4): n is a, c, g, or t
  misc_feature (13)..(13): n is a, c, g, or t
  misc_feature (16)..(17): n is a, c, g, or t
  misc_feature (19)..(20): n is a, c, g, or t
  misc_feature (22)..(22): n is a, c, g, or t
  misc_feature (25)..(26): n is a, c, g, or t
  misc_feature (37)..(37): n is a, c, g, or t
  misc_feature (41)..(41): n is a, c, g, or t
  misc_feature (64)..(64): n is a, c, g, or t
  misc_feature (66)..(66): n is a, c, g, or t
  misc_feature (71)..(71): n is a, c, g, or t
  misc_feature (73)..(73): n is a, c, g, or t
  misc_feature (79)..(79): n is a, c, g, or t
  misc_feature (92)..(93): n is a, c, g, or t
  misc_feature (99)..(101): n is a, c, g, or t
  misc_feature (103)..(105): n is a, c, g, or t
  misc_feature (107)..(107): n is a, c, g, or t
  misc_feature (111)..(114): n is a, c, g, or t
  misc_feature (133)..(133): n is a, c, g, or t
  misc_feature (135)..(135): n is a, c, g, or t
  misc_feature (139)..(141): n is a, c, g, or t
  misc_feature (147)..(149): n is a, c, g, or t
  misc_feature (151)..(151): n is a, c, g, or t
  misc_feature (157)..(157): n is a, c, g, or t
  misc_feature (162)..(162): n is a, c, g, or t
  misc_feature (164)..(165): n is a, c, g, or t
  misc_feature (169)..(170): n is a, c, g, or t
  misc_feature (172)..(172): n is a, c, g, or t
  misc_feature (175)..(177): n is a, c, g, or t
  misc_feature (188)..(188): n is a, c, g, or t
  misc_feature (190)..(190): n is a, c, g, or t
  misc_feature (192)..(192): n is a, c, g, or t
  misc_feature (196)..(198): n is a, c, g, or t
  misc_feature (200)..(200): n is a, c, g, or t
  misc_feature (209)..(210): n is a, c, g, or t
  misc_feature (217)..(217): n is a, c, g, or t
  misc_feature (220)..(221): n is a, c, g, or t
  misc_feature (226)..(226): n is a, c, g, or t
  misc_feature (233)..(234): n is a, c, g, or t
  misc_feature (241)..(242): n is a, c, g, or t
  misc_feature (245)..(250): n is a, c, g, or t
  misc_feature (255)..(255): n is a, c, g, or t
gnnntggtggccnggnngnncnaannattaaggagangaanttttttttgccaggggaggatantnatcancntcacgngggacttttttgnngggggnnnannnangggnnnnccgggcgcggggcgcgggngngggnnnggaagnnnangggggngggantnnacgnngnagnnnagatgggagcncnanacgnnngnccaggacgnncgggggnttnngtggnaggcgcnngaggttnngtnnnnnnttgcng

SEQ ID NO: 262 - DNA, 1311 bp, Homo Sapiens
  misc_feature (962)..(963): n is a, c, g, or t
  misc_feature (967)..(967): n is a, c, g, or t
  misc_feature (976)..(976): n is a, c, g, or t
  misc_feature (1015)..(1015): n is a, c, g, or t
  misc_feature (1021)..(1021): n is a, c, g, or t
  misc_feature (1024)..(1024): n is a, c, g, or t
  misc_feature (1027)..(1027): n is a, c, g, or t
  misc_feature (1030)..(1030): n is a, c, g, or t
  misc_feature (1033)..(1033): n is a, c, g, or t
  misc_feature (1044)..(1044): n is a, c, g, or t
  misc_feature (1047)..(1047): n is a, c, g, or t
  misc_feature (1058)..(1058): n is a, c, g, or t
  misc_feature (1063)..(1063): n is a, c, g, or t
  misc_feature (1067)..(1067): n is a, c, g, or t
  misc_feature (1101)..(1101): n is a, c, g, or t
  misc_feature (1107)..(1107): n is a, c, g, or t
  misc_feature (1118)..(1118): n is a, c, g, or t
  misc_feature (1121)..(1121): n is a, c, g, or t
  misc_feature (1136)..(1136): n is a, c, g, or t
  misc_feature (1139)..(1139): n is a, c, g, or t
  misc_feature (1149)..(1149): n is a, c, g, or t
  misc_feature (1165)..(1165): n is a, c, g, or t
  misc_feature (1172)..(1172): n is a, c, g, or t
  misc_feature (1179)..(1179): n is a, c, g, or t
  misc_feature (1194)..(1194): n is a, c, g, or t
  misc_feature (1196)..(1196): n is a, c, g, or t
  misc_feature (1199)..(1201): n is a, c, g, or t
  misc_feature (1203)..(1204): n is a, c, g, or t
  misc_feature (1207)..(1207): n is a, c, g, or t
  misc_feature (1213)..(1213): n is a, c, g, or t
  misc_feature (1216)..(1216): n is a, c, g, or t
  misc_feature (1220)..(1220): n is a, c, g, or t
  misc_feature (1222)..(1223): n is a, c, g, or t
  misc_feature (1230)..(1230): n is a, c, g, or t
  misc_feature (1241)..(1242): n is a, c, g, or t
  misc_feature (1249)..(1249): n is a, c, g, or t
  misc_feature (1252)..(1252): n is a, c, g, or t
  misc_feature (1257)..(1257): n is a, c, g, or t
  misc_feature (1262)..(1262): n is a, c, g, or t
  misc_feature (1264)..(1265): n is a, c, g, or t
  misc_feature (1268)..(1269): n is a, c, g, or t
  misc_feature (1272)..(1311): n is a, c, g, or t
ttgagaaattactatgagaggatcgcatcaccatcaccatcacggatcctatttaggtgacactatagaatcgtcgacccacgcgtccggcgcgagcagtagctgggtgggcaccatggctgggatcaccaccatcgaggcggtgaagcgcaagatccaggttctgcagcagcaggcagatgatgcagaggagcgagctgagcgcctccagcgagaagttgagggagaaaggcgggcccgggaacaggctgaggctgaggtggcctccttgaaccgtaggatccagctggttgaagaagagctggaccgtgctcaggagcgcctggccactgccctgcaaaagctggaagaagctgaaaaagctgctgatgagagtgagagaggtatgaaggttattgaaaaccgggccttaaaagatgaagaaaagatggaactccaggaaatccaactcaaagaagctaagcacattgcagaagaggcagataggaagtatgaagaggtggctcgtaagttggtgatcattgaaggagacttggaacgcacagaggaacgagctgagctggcagagtcccgttgccgagagatggatgagcagattagactgatggaccagaacctgaagtgtctgagtgctgctgaagaaaagtactctcaaaaagaagataaatatgaggaagaaatcaagattcttactgataaactcaaggaggcagagacccgtgctgagtttgctgagagatcggtagccaagctggaaaagacaattgatgacctggaagagcgtctctacagccaacttgagcgaaaccgcctgctttctaatgagctgaaacctaacgctgcatgatctgtgtgactgatgggcagggctcaatgatgcccattaaactgagcttactgctcacaccactgacctggaccccaacaaaaagctgattgtctttttaaaagttattattttnncccntgaaccaanttgcattttaatttgggccatttaaaatgtttattttcntaacanccnttntgnaantttgaccattnggnaaaattttctntcccntttnaaaaaaaaatttattgggttgaaaaaaagggaangggccntgaaaaaattnaantggaaaaaaaccttngcnaaaaattttntttttccccccccttnttttgcnggccccnttccccttggggccncntgnnngnnaanaaaatnttncccntnncgggggnatttttttaannaaaaaanggncctgnctttnannaannaannnnnnnnnnnnnnnnnnnnnnnnnnnnnnnnnnnnnnnn

SEQ ID NO: 263 - DNA, 1098 bp, Homo Sapiens
  misc_feature (1)..(2): n is a, c, g, or t
  misc_feature (4)..(4): n is a, c, g, or t
  misc_feature (797)..(797): n is a, c, g, or t
  misc_feature (805)..(805): n is a, c, g, or t
  misc_feature (808)..(808): n is a, c, g, or t
  misc_feature (827)..(827): n is a, c, g, or t
  misc_feature (840)..(840): n is a, c, g, or t
  misc_feature (847)..(847): n is a, c, g, or t
  misc_feature (861)..(861): n is a, c, g, or t
  misc_feature (869)..(869): n is a, c, g, or t
  misc_feature (871)..(871): n is a, c, g, or t
  misc_feature (873)..(873): n is a, c, g, or t
  misc_feature (876)..(876): n is a, c, g, or t
  misc_feature (881)..(881): n is a, c, g, or t
  misc_feature (886)..(886): n is a, c, g, or t
  misc_feature (891)..(891): n is a, c, g, or t
  misc_feature (898)..(898): n is a, c, g, or t
  misc_feature (914)..(915): n is a, c, g, or t
  misc_feature (919)..(919): n is a, c, g, or t
  misc_feature (929)..(929): n is a, c, g, or t
  misc_feature (934)..(934): n is a, c, g, or t
  misc_feature (943)..(943): n is a, c, g, or t
  misc_feature (945)..(945): n is a, c, g, or t
  misc_feature (950)..(951): n is a, c, g, or t
  misc_feature (956)..(956): n is a, c, g, or t
  misc_feature (962)..(962): n is a, c, g, or t
  misc_feature (969)..(970): n is a, c, g, or t
  misc_feature (979)..(979): n is a, c, g, or t
  misc_feature (982)..(982): n is a, c, g, or t
  misc_feature (985)..(985): n is a, c, g, or t
  misc_feature (995)..(997): n is a, c, g, or t
  misc_feature (1005)..(1005): n is a, c, g, or t
  misc_feature (1010)..(1010): n is a, c, g, or t
  misc_feature (1012)..(1012): n is a, c, g, or t
  misc_feature (1016)..(1016): n is a, c, g, or t
  misc_feature (1034)..(1034): n is a, c, g, or t
  misc_feature (1037)..(1037): n is a, c, g, or t
  misc_feature (1051)..(1057): n is a, c, g, or t
  misc_feature (1060)..(1060): n is a, c, g, or t
  misc_feature (1062)..(1095): n is a, c, g, or t
  misc_feature (1097)..(1098): n is a, c, g, or t
nnantgagaaattactatgagaggatcgcatcaccatcaccatcacggatcctatttaggtgacactatagaatcgtcgacccacgcgtccgccggagcccttgagcgcgaggcgcggagcccccggagcccccaaaccgcagacacatccccgcgccccagagccccggcctgcgcgcccagccgggcccgcgcgatgccctcagaccggcctttcaagcagcggcggagcttcgccgaccgctgtaaggaggtacagcagatccgcgaccagcaccccagcaaaatcccggtgatcatcgagcgctacaagggtgagaagcagctgcccgtcctggacaagaccaagtttttggtcccggaccatgtcaacatgagcgagttggtcaagatcatccggcgccgcctgcagctgaaccccacgcaggccttcttcctgctggtgaaccagcacagcatggtgagtgtgtccacgcccatcgcggacatctacgagcaggagaaagacgaggacggcttcctctatatggtctacgcctcccaggaaaccttcggcttctgagccagcagtaggggggctcggcctgggagtcggggggccccggtcaggccctgcccagagagctcctggttcctgaactgagctgcctctaccgtggtgggctgggcaggcatgtgcccccctagtcagagggcaccaacccacctactctgcccctgggtggatcctgggccggtcgtgttagggttgtccctctggggtgctggctggtgggatgggggagggtggggagcancttcccancanccctgctgtgtggttcatntttttttttaagncccctgnctgtctgcccaatntgcccccntnanccnacccnaaggntttgncaaccgncttggaatctggcccnncccntgaaaaaaantgggncccttgggntnccccnnccccnttgggnttttccnngtggggggnaanggnatttgggggnnnattttgtnccctntngganaaaaaaaaaaaaatttgnttnaggcctttcttggnnnnnnnaanannnnnnnnnnnnnnnnnnnnnnnnnnnnnnnnnnann

SEQ ID NO: 264 - DNA, 1223 bp, Homo Sapiens
  misc_feature (1)..(1): n is a, c, g, or t
  misc_feature (887)..(887): n is a, c, g, or t
  misc_feature (915)..(915): n is a, c, g, or t
  misc_feature (940)..(940): n is a, c, g, or t
  misc_feature (955)..(955): n is a, c, g, or t
  misc_feature (957)..(957): n is a, c, g, or t
  misc_feature (1022)..(1023): n is a, c, g, or t
  misc_feature (1026)..(1026): n is a, c, g, or t
  misc_feature (1028)..(1028): n is a, c, g, or t
  misc_feature (1032)..(1032): n is a, c, g, or t
  misc_feature (1034)..(1034): n is a, c, g, or t
  misc_feature (1037)..(1037): n is a, c, g, or t
  misc_feature (1045)..(1045): n is a, c, g, or t
  misc_feature (1054)..(1054): n is a, c, g, or t
  misc_feature (1058)..(1058): n is a, c, g, or t
  misc_feature (1060)..(1060): n is a, c, g, or t
  misc_feature (1086)..(1087): n is a, c, g, or t
  misc_feature (1089)..(1089): n is a, c, g, or t
  misc_feature (1094)..(1094): n is a, c, g, or t
  misc_feature (1097)..(1097): n is a, c, g, or t
  misc_feature (1124)..(1124): n is a, c, g, or t
  misc_feature (1132)..(1132): n is a, c, g, or t
  misc_feature (1134)..(1135): n is a, c, g, or t
  misc_feature (1137)..(1137): n is a, c, g, or t
  misc_feature (1150)..(1151): n is a, c, g, or t
  misc_feature (1159)..(1159): n is a, c, g, or t
  misc_feature (1161)..(1161): n is a, c, g, or t
  misc_feature (1169)..(1169): n is a, c, g, or t
  misc_feature (1188)..(1188): n is a, c, g, or t
  misc_feature (1201)..(1201): n is a, c, g, or t
  misc_feature (1205)..(1205): n is a, c, g, or t
  misc_feature (1208)..(1208): n is a, c, g, or t
  misc_feature (1217)..(1217): n is a, c, g, or t
  misc_feature (1220)..(1220): n is a, c, g, or t
naattagagaaattactatgagaggatcgcatcaccatcaccatcacggatcctatttaggtgacactatagaatcgtcgacccacgcgtccgcccgcttcgtctgcgtctctgatacccactcgaggacggaccccatccagatgccgtacggcgacgtgctgatccacgctggggacttcactgagctggggctcccgagcgaggtgaagaagttcaacgagtggctgggcagcctgccctacgagtacaagatcgtgatcgcaggcaaccacgagctgacctttgaccaggagttcatggccgacctcatcaagcaggacttttactacttcccatctgtgtcgaagctgaagccggagaactatgagaatgtgcagtcgctgctgaccaactgcatctaccttcaggactcggaggtcaccgtgcggggcttccggatctatggctccccatggcagccctggttctacggctggggcttcaacctcccgcgaggccaagccctgctggagaaatggaacctcattcccgaaggcgtagacatcctgataacccatggaccaccactgggcttcctggactgggtccccaagaagatgcagcgggtgggctgtgtggagctgctcaacacggtgcagaggcgcgtccagccgcggttacatgtctttggccacatccacgaagggtatggtgtcatggcagatgggacgaccacctatgtgaatgcgtccgtatgcactgtgaactaccagcccgtgaacccgcccatagtcatcgacctccccacaccccggaactcctgactgctccccactgcccctgccctgcccgcccgtgtcagctccacaggcctggcccggccactgttccttccatgctgagtngcctggacaaccatctggctgcggggantggcctaacaggcaggtcaggcctnggaacgactctttancnttctgtccctggagttggaccctgcgcatccccatcaggggttctgggctcatttactttttcgnnggnantccngnggnacctcgtnaaggactantaancntatggccctgtcattttggaaaagannanttttnttnttcccctggaacccccctggttggaanctgctgcntnnanggttttgaaatannaaatcccntnacccggtnttgggggggctccctgggnggggggggggaantttnganttccaaaantcnttt

SEQ ID NO: 265 - DNA, 1239 bp, Homo Sapiens
  misc_feature (751)..(751): n is a, c, g, or t
  misc_feature (796)..(796): n is a, c, g, or t
  misc_feature (799)..(799): n is a, c, g, or t
  misc_feature (811)..(811): n is a, c, g, or t
  misc_feature (826)..(826): n is a, c, g, or t
  misc_feature (839)..(839): n is a, c, g, or t
  misc_feature (853)..(853): n is a, c, g, or t
  misc_feature (861)..(861): n is a, c, g, or t
  misc_feature (866)..(866): n is a, c, g, or t
  misc_feature (889)..(889): n is a, c, g, or t
  misc_feature (891)..(891): n is a, c, g, or t
  misc_feature (901)..(901): n is a, c, g, or t
  misc_feature (915)..(915): n is a, c, g, or t
  misc_feature (943)..(943): n is a, c, g, or t
  misc_feature (950)..(950): n is a, c, g, or t
  misc_feature (954)..(954): n is a, c, g, or t
  misc_feature (970)..(970): n is a, c, g, or t
  misc_feature (978)..(978): n is a, c, g, or t
  misc_feature (993)..(993): n is a, c, g, or t
  misc_feature (996)..(996): n is a, c, g, or t
  misc_feature (998)..(999): n is a, c, g, or t
  misc_feature (1002)..(1002): n is a, c, g, or t
  misc_feature (1009)..(1009): n is a, c, g, or t
  misc_feature (1015)..(1016): n is a, c, g, or t
  misc_feature (1032)..(1032): n is a, c, g, or t
  misc_feature (1039)..(1039): n is a, c, g, or t
  misc_feature (1052)..(1052): n is a, c, g, or t
  misc_feature (1062)..(1062): n is a, c, g, or t
  misc_feature (1066)..(1066): n is a, c, g, or t
  misc_feature (1076)..(1076): n is a, c, g, or t
  misc_feature (1084)..(1084): n is a, c, g, or t
  misc_feature (1088)..(1088): n is a, c, g, or t
  misc_feature (1092)..(1092): n is a, c, g, or t
  misc_feature (1126)..(1126): n is a, c, g, or t
  misc_feature (1145)..(1145): n is a, c, g, or t
  misc_feature (1150)..(1150): n is a, c, g, or t
  misc_feature (1152)..(1152): n is a, c, g, or t
  misc_feature (1155)..(1155): n is a, c, g, or t
  misc_feature (1157)..(1157): n is a, c, g, or t
  misc_feature (1162)..(1162): n is a, c, g, or t
  misc_feature (1170)..(1170): n is a, c, g, or t
  misc_feature (1181)..(1181): n is a, c, g, or t
  misc_feature (1184)..(1185): n is a, c, g, or t
  misc_feature (1188)..(1189): n is a, c, g, or t
  misc_feature (1198)..(1199): n is a, c, g, or t
  misc_feature (1204)..(1204): n is a, c, g, or t
  misc_feature (1206)..(1206): n is a, c, g, or t
  misc_feature (1210)..(1210): n is a, c, g, or t
  misc_feature (1219)..(1219): n is a, c, g, or t
attagagaaattactatgagaggatcgcatcaccatcaccatcacggtatcctatttaggtgacactatagaatcgtcgacccacgcgttccgcggaagcgggggtgcagcgcggcagaatgagggttgattcctcggctgaccccacaatgtcgcaggagcaagggccggggtcctccacgcctcccagttctccgacacttcttgacgctctgctccagaacctttacgactttggaggtacagaaggtgaaacagaacagaagaagatcataaagaaaagggaaaacaagaagagagatgtgatggcttcagcggccttggcagcagagccatctcccctacctggttctctcataagaggccagaggaagagcgcttcgagcttcttcaaggaacttagagaagagcggcattgtgctccttctgggacccccacaggaccagagatccttgctgctgcagttcctccctcttccctaaagaacaatagggaacaagtagaagtggtagaatttcacagcaataaaaaaagaaaattgacgccagatcataacaagaacacaaaggctaatcctagtgttttggagagagatgtggatacacaagaatttaacctagaaaaagctcgtttagaagtgcaccggtttggtatcacgggttatggaaaaggaaaggagagaatcctggaacaggaacgtgccattatgctgggcgctaagcctcctaaaaagagttatgtgaattacanggttttacaggagcaaattaaagaaaaaaaggcagcaaagggaanaanaaaagagactgncccaagaaacaaatnttttcaaaaaaanaaaaagaaaggacnggaggacnggaantcccaaaagaagtccgctcccantntttgtcaatnggacggattggacnggttggaaaattcaaaatggaaccctgnttctgancccngtttatatcaaaaaantaatttcntccaaagggccaaanaantnnttngccaaanaaaacnngggagggaaaaattgnattccantgggggggccctnggacctgggnaatntaaaaaaatnttttttanccgntttncaaattttttttttttttaaaaaaaaatcaaaanaattatttttttttttccnaaatntnttntntgggnttaaacgntcccgccccgngcnnttnngtggaaagnnccccntnaagngtttttttnttccccccactttccctttg

SEQ ID NO: 266 - DNA, 1204 bp, Homo Sapiens
  misc_feature (870)..(870): n is a, c, g, or t
  misc_feature (919)..(919): n is a, c, g, or t
  misc_feature (933)..(933): n is a, c, g, or t
  misc_feature (960)..(960): n is a, c, g, or t
  misc_feature (966)..(966): n is a, c, g, or t
  misc_feature (981)..(981): n is a, c, g, or t
  misc_feature (997)..(997): n is a, c, g, or t
  misc_feature (1000)..(1000): n is a, c, g, or t
  misc_feature (1008)..(1009): n is a, c, g, or t
  misc_feature (1025)..(1026): n is a, c, g, or t
  misc_feature (1029)..(1031): n is a, c, g, or t
  misc_feature (1037)..(1037): n is a, c, g, or t
  misc_feature (1042)..(1042): n is a, c, g, or t
  misc_feature (1060)..(1060): n is a, c, g, or t
  misc_feature (1063)..(1063): n is a, c, g, or t
  misc_feature (1070)..(1070): n is a, c, g, or t
  misc_feature (1072)..(1072): n is a, c, g, or t
  misc_feature (1078)..(1078): n is a, c, g, or t
  misc_feature (1084)..(1085): n is a, c, g, or t
  misc_feature (1092)..(1092): n is a, c, g, or t
  misc_feature (1110)..(1110): n is a, c, g, or t
  misc_feature (1119)..(1119): n is a, c, g, or t
  misc_feature (1131)..(1131): n is a, c, g, or t
  misc_feature (1139)..(1140): n is a, c, g, or t
  misc_feature (1149)..(1152): n is a, c, g, or t
  misc_feature (1157)..(1158): n is a, c, g, or t
  misc_feature (1166)..(1166): n is a, c, g, or t
  misc_feature (1175)..(1175): n is a, c, g, or t
  misc_feature (1178)..(1179): n is a, c, g, or t
  misc_feature (1181)..(1181): n is a, c, g, or t
  misc_feature (1184)..(1184): n is a, c, g, or t
  misc_feature (1189)..(1189): n is a, c, g, or t
  misc_feature (1194)..(1194): n is a, c, g, or t
  misc_feature (1197)..(1197): n is a, c, g, or t
  misc_feature (1201)..(1202): n is a, c, g, or t
tagagaaattactatgagaggatcgcatcaccatcaccatcacggatcctatttaggtgacactatagaatcgtcgacccacgcgtccggggaagaaccagtactaaaagaggaagccccagttcagccaatactatcttctgttccaacaacggaagtgtccactggtgttaagtttcaggttggcgatcttgtgtggtccaaggtgggaacctatccttggtggccttgtatggtttcaagtgatccccagcttgaggttcatactaaaattaacacaagaggtgcccgagaatatcatgtccagttttttagcaaccagccagagagggcgtgggttcatgaaaaacgggtacgagagtataaaggtcataaacagtatgaagaattactggctgaggcaaccaaacaagccagcaatcactctgagaaacaaaagattcggaaaccccgacctcagagagaacgtgctcagtgggatattggcattgcccatgcagagaaagcattgaaaatgactcgagaagaaagaatagaacagtatacttttatttacattgataaacagcctgaagaggctttatcccaagcaaaaaagagtgttgcctccaaaaccgaagttaaaaaaacccgacgaccaagatctgtgctgaatactcagccagaacagaccaatgcaggggaggtggcctcctcactctcaagtactgaaattcggagacatagccagaggcggcacacaagtgcggaagaggaagagccaccgcctgttaaaatagcctggaaaactgcggcagcaaggaaatccttaccagcttccattacgatgcacaaagggagcctggatttgcagaagtgtaacatgtctcngttgtgaaaattgaacaagtgttgctcttcaaatgctacaggggatggnaatttatcgatcanttgtttttccacaagggaattggtaanaaacanaatagtgtcaggggncagacggcttatattnctncccaaccnnagaatgaaagcccccnnagnnntcttcnctgancaactttggttctacggntcntaaaaananccccgnaaaatnnttaaccnttcgatcaaaatccctgngtggccaanaaaaatcaaagnacggtgannttcccgctnnnnaacgnntaaaaagncgggacggnagnngnttncaatntgacnccncccnntg

SEQ ID NO: 267 - DNA, 1497 bp, Homo Sapiens
  misc_feature (36)..(36): n is a, c, g, or t
  misc_feature (43)..(43): n is a, c, g, or t
  misc_feature (63)..(63): n is a, c, g, or t
  misc_feature (75)..(75): n is a, c, g, or t
  misc_feature (137)..(137): n is a, c, g, or t
  misc_feature (273)..(273): n is a, c, g, or t
  misc_feature (375)..(375): n is a, c, g, or t
  misc_feature (397)..(397): n is a, c, g, or t
  misc_feature (433)..(433): n is a, c, g, or t
  misc_feature (536)..(536): n is a, c, g, or t
  misc_feature (545)..(545): n is a, c, g, or t
  misc_feature (550)..(550): n is a, c, g, or t
  misc_feature (563)..(563): n is a, c, g, or t
  misc_feature (568)..(568): n is a, c, g, or t
  misc_feature (583)..(584): n is a, c, g, or t
  misc_feature (593)..(593): n is a, c, g, or t
  misc_feature (600)..(600): n is a, c, g, or t
  misc_feature (635)..(635): n is a, c, g, or t
  misc_feature (644)..(644): n is a, c, g, or t
  misc_feature (651)..(651): n is a, c, g, or t
  misc_feature (654)..(654): n is a, c, g, or t
  misc_feature (656)..(656): n is a, c, g, or t
  misc_feature (660)..(661): n is a, c, g, or t
  misc_feature (665)..(666): n is a, c, g, or t
  misc_feature (670)..(670): n is a, c, g, or t
  misc_feature (673)..(673): n is a, c, g, or t
  misc_feature (683)..(683): n is a, c, g, or t
  misc_feature (688)..(689): n is a, c, g, or t
  misc_feature (701)..(701): n is a, c, g, or t
  misc_feature (706)..(706): n is a, c, g, or t
  misc_feature (712)..(713): n is a, c, g, or t
  misc_feature (725)..(725): n is a, c, g, or t
  misc_feature (733)..(735): n is a, c, g, or t
  misc_feature (740)..(740): n is a, c, g, or t
  misc_feature (742)..(742): n is a, c, g, or t
  misc_feature (756)..(756): n is a, c, g, or t
  misc_feature (763)..(763): n is a, c, g, or t
  misc_feature (778)..(778): n is a, c, g, or t
  misc_feature (780)..(780): n is a, c, g, or t
  misc_feature (782)..(782): n is a, c, g, or t
  misc_feature (788)..(788): n is a, c, g, or t
  misc_feature (792)..(792): n is a, c, g, or t
  misc_feature (794)..(794): n is a, c, g, or t
  misc_feature (797)..(797): n is a, c, g, or t
  misc_feature (806)..(806): n is a, c, g, or t
  misc_feature (811)..(812): n is a, c, g, or t
  misc_feature (824)..(824): n is a, c, g, or t
  misc_feature (827)..(829): n is a, c, g, or t
  misc_feature (836)..(836): n is a, c, g, or t
  misc_feature (844)..(845): n is a, c, g, or t
  misc_feature (849)..(849): n is a, c, g, or t
  misc_feature (853)..(853): n is a, c, g, or t
  misc_feature (856)..(856): n is a, c, g, or t
  misc_feature (863)..(863): n is a, c, g, or t
  misc_feature (903)..(903): n is a, c, g, or t
  misc_feature (907)..(907): n is a, c, g, or t
  misc_feature (910)..(913): n is a, c, g, or t
  misc_feature (915)..(915): n is a, c, g, or t
  misc_feature (923)..(923): n is a, c, g, or t
  misc_feature (928)..(929): n is a, c, g, or t
  misc_feature (935)..(935): n is a, c, g, or t
  misc_feature (940)..(940): n is a, c, g, or t
  misc_feature (943)..(943): n is a, c, g, or t
  misc_feature (946)..(946): n is a, c, g, or t
  misc_feature (949)..(949): n is a, c, g, or t
  misc_feature (964)..(964): n is a, c, g, or t
  misc_feature (971)..(972): n is a, c, g, or t
  misc_feature (979)..(979): n is a, c, g, or t
  misc_feature (982)..(982): n is a, c, g, or t
  misc_feature (991)..(991): n is a, c, g, or t
  misc_feature (998)..(998): n is a, c, g, or t
  misc_feature (1001)..(1002): n is a, c, g, or t
  misc_feature (1004)..(1004): n is a, c, g, or t
  misc_feature (1007)..(1007): n is a, c, g, or t
  misc_feature (1010)..(1010): n is a, c, g, or t
  misc_feature (1012)..(1013): n is a, c, g, or t
  misc_feature (1015)..(1015): n is a, c, g, or t
  misc_feature (1024)..(1025): n is a, c, g, or t
  misc_feature (1032)..(1032): n is a, c, g, or t
  misc_feature (1041)..(1041): n is a, c, g, or t
  misc_feature (1045)..(1046): n is a, c, g, or t
  misc_feature (1055)..(1055): n is a, c, g, or t
  misc_feature (1061)..(1061): n is a, c, g, or t
  misc_feature (1066)..(1066): n is a, c, g, or t
  misc_feature (1068)..(1068): n is a, c, g, or t
  misc_feature (1070)..(1070): n is a, c, g, or t
  misc_feature (1086)..(1086): n is a, c, g, or t
  misc_feature (1099)..(1099): n is a, c, g, or t
  misc_feature (1101)..(1101): n is a, c, g, or t
  misc_feature (1109)..(1109): n is a, c, g, or t
  misc_feature (1115)..(1115): n is a, c, g, or t
  misc_feature (1122)..(1122): n is a, c, g, or t
  misc_feature (1125)..(1125): n is a, c, g, or t
  misc_feature (1127)..(1127): n is a, c, g, or t
  misc_feature (1135)..(1135): n is a, c, g, or t
  misc_feature (1145)..(1146): n is a, c, g, or t
  misc_feature (1157)..(1157): n is a, c, g, or t
  misc_feature (1159)..(1161): n is a, c, g, or t
  misc_feature (1166)..(1166): n is a, c, g, or t
  misc_feature (1169)..(1169): n is a, c, g, or t
  misc_feature (1177)..(1178): n is a, c, g, or t
  misc_feature (1187)..(1187): n is a, c, g, or t
  misc_feature (1205)..(1205): n is a, c, g, or t
  misc_feature (1208)..(1209): n is a, c, g, or t
  misc_feature (1214)..(1214): n is a, c, g, or t
  misc_feature (1217)..(1218): n is a, c, g, or t
  misc_feature (1221)..(1221): n is a, c, g, or t
  misc_feature (1225)..(1225): n is a, c, g, or t
  misc_feature (1227)..(1228): n is a, c, g, or t
  misc_feature (1232)..(1232): n is a, c, g, or t
  misc_feature (1236)..(1236): n is a, c, g, or t
  misc_feature (1247)..(1248): n is a, c, g, or t
  misc_feature (1255)..(1255): n is a, c, g, or t
  misc_feature (1274)..(1274): n is a, c, g, or t
  misc_feature (1278)..(1278): n is a, c, g, or t
  misc_feature (1281)..(1281): n is a, c, g, or t
  misc_feature (1284)..(1285): n is a, c, g, or t
  misc_feature (1287)..(1287): n is a, c, g, or t
  misc_feature (1291)..(1291): n is a, c, g, or t
  misc_feature (1299)..(1299): n is a, c, g, or t
  misc_feature (1302)..(1302): n is a, c, g, or t
  misc_feature (1307)..(1307): n is a, c, g, or t
  misc_feature (1316)..(1316): n is a, c, g, or t
  misc_feature (1323)..(1323): n is a, c, g, or t
  misc_feature (1326)..(1326): n is a, c, g, or t
  misc_feature (1332)..(1332): n is a, c, g, or t
  misc_feature (1372)..(1372): n is a, c, g, or t
  misc_feature (1380)..(1381): n is a, c, g, or t
  misc_feature (1383)..(1385): n is a, c, g, or t
  misc_feature (1394)..(1394): n is a, c, g, or t
  misc_feature (1397)..(1397): n is a, c, g, or t
  misc_feature (1400)..(1401): n is a, c, g, or t
  misc_feature (1407)..(1407): n is a, c, g, or t
  misc_feature (1419)..(1419): n is a, c, g, or t
  misc_feature (1422)..(1422): n is a, c, g, or t
  misc_feature (1424)..(1424): n is a, c, g, or t
  misc_feature (1434)..(1434): n is a, c, g, or t
  misc_feature (1441)..(1441): n is a, c, g, or t
  misc_feature (1443)..(1443): n is a, c, g, or t
  misc_feature (1445)..(1445): n is a, c, g, or t
  misc_feature (1449)..(1449): n is a, c, g, or t
  misc_feature (1451)..(1451): n is a, c, g, or t
  misc_feature (1455)..(1455): n is a, c, g, or t
  misc_feature (1457)..(1457): n is a, c, g, or t
  misc_feature (1461)..(1461): n is a, c, g, or t
  misc_feature (1463)..(1463): n is a, c, g, or t
  misc_feature (1466)..(1466): n is a, c, g, or t
  misc_feature (1474)..(1476): n is a, c, g, or t
  misc_feature (1485)..(1485): n is a, c, g, or t
  misc_feature (1497)..(1497): n is a, c, g, or t
aaatagagaaattaattatgaagaggatcgcatcancattcancactcacggatcctatttangtgacactatanaatcgtcgacccacgcgtccggctggagcaggcgagcggcggcggccgatagcgagtgtcanggacggccggggccggggctgcggcgggccggccggggcggcgcttctcggcctgtcgctggtcggcctcctactgtacctcgtgcctgctgcggctgcgctggcctggctggccgtggggactaccgcggcctgntggggactgagcagcgagccccgaggttcgcgccccttgtcctccttcgttcagaaggcgcgacatcggcgaacactgttcgcttcgcctccggccaagtcnacagccaacggaaacctcctanagccgcggaccctgctcgaaggacctgaccctgccnaactgctcctcatgggcagttacctgggcaagcccgggccgccgcagcccgcccccgctccggagggccaggacctgcggaataggcctggccgccgcccgcncgcccggcnccgcnctccacaccgccntccanaccgccctccccgcnnacccatcgngttcacnacttttacccctctctccccaaatccacttctccnaccctccgngaggacnttncncaanntatnngtgngantttaaccaanatcgnnttgtaaataaanacctntaatanntttatctcgatnccatcaannnccaananattcctgttctggnagggtanttctcaaaattttgnangnaaatgnttantnaanataaaaggnttgtnnctgttcccctcncannntttccanaaaagatnngtanctanatngaattcnaaaaatttcccctccataacaaaaaaatttttcccttttntacnaannnnanaaattaanaattnntctttnaaaanttnttnttnaaaattcaaattaanttcaccnnaaaatcnaantgttaaaantaaaacnttnntnaantgncnntnaaacaaaannaaaaaanaaaatgatntctnnaaaaaaaantaaaanattantncnttgtaatataaaaaanattaatataaatntntcttgttnaaattntcattanaanantctttttntatttaaatnnctcaataatgnannnaaatncanttacattnntaaattgantatcttcatttattatanaannattanaanntanaaantnntttnaacnattaaaatttnncttatanaaaattaattcaaaaaatntatnttntcnntntttntacaaatntantatangtgattaanaatatanttntaatanctttaattttttacaataaatatttttccctacacttttntataaacnntnnntacattacntanttnntctatnctaataattctnttnancaataaaatnaagtaantngnattntntacntntaantnttntactgttnnnatgttattntaattataatan

SEQ ID NO: 268 - DNA, 1263 bp, Homo Sapiens
  misc_feature (902)..(902): n is a, c, g, or t
  misc_feature (913)..(913): n is a, c, g, or t
  misc_feature (921)..(922): n is a, c, g, or t
  misc_feature (927)..(927): n is a, c, g, or t
  misc_feature (985)..(985): n is a, c, g, or t
  misc_feature (987)..(987): n is a, c, g, or t
  misc_feature (995)..(995): n is a, c, g, or t
  misc_feature (1001)..(1002): n is a, c, g, or t
  misc_feature (1007)..(1007): n is a, c, g, or t
  misc_feature (1012)..(1012): n is a, c, g, or t
  misc_feature (1014)..(1014): n is a, c, g, or t
  misc_feature (1032)..(1032): n is a, c, g, or t
  misc_feature (1036)..(1036): n is a, c, g, or t
  misc_feature (1052)..(1053): n is a, c, g, or t
  misc_feature (1055)..(1056): n is a, c, g, or t
  misc_feature (1063)..(1063): n is a, c, g, or t
  misc_feature (1069)..(1069): n is a, c, g, or t
  misc_feature (1080)..(1080): n is a, c, g, or t
  misc_feature (1097)..(1098): n is a, c, g, or t
  misc_feature (1100)..(1101): n is a, c, g, or t
  misc_feature (1107)..(1107): n is a, c, g, or t
  misc_feature (1111)..(1111): n is a, c, g, or t
  misc_feature (1121)..(1121): n is a, c, g, or t
  misc_feature (1135)..(1135): n is a, c, g, or t
  misc_feature (1138)..(1138): n is a, c, g, or t
  misc_feature (1141)..(1142): n is a, c, g, or t
  misc_feature (1150)..(1150): n is a, c, g, or t
  misc_feature (1158)..(1158): n is a, c, g, or t
  misc_feature (1161)..(1161): n is a, c, g, or t
  misc_feature (1164)..(1165): n is a, c, g, or t
  misc_feature (1170)..(1170): n is a, c, g, or t
  misc_feature (1173)..(1175): n is a, c, g, or t
  misc_feature (1177)..(1177): n is a, c, g, or t
  misc_feature (1181)..(1181): n is a, c, g, or t
  misc_feature (1187)..(1187): n is a, c, g, or t
  misc_feature (1191)..(1193): n is a, c, g, or t
  misc_feature (1198)..(1198): n is a, c, g, or t
  misc_feature (1201)..(1202): n is a, c, g, or t
  misc_feature (1210)..(1210): n is a, c, g, or t
  misc_feature (1215)..(1215): n is a, c, g, or t
  misc_feature (1218)..(1218): n is a, c, g, or t
  misc_feature (1223)..(1223): n is a, c, g, or t
  misc_feature (1247)..(1249): n is a, c, g, or t
  misc_feature (1255)..(1255): n is a, c, g, or t
  misc_feature (1258)..(1260): n is a, c, g, or t
  misc_feature (1263)..(1263): n is a, c, g, or t
tagagaaattactatgagaggatcgcatcaccatcaccatcacggatcctatttaggtgacactatagaatcgtcgacccacgcgtccgcccacgcgtccgtgagccggctacagtccacagagttcagcccatcagggagtgagactggaagcccaggcctgcagaacggagagggccagagggggaggatggaccgggggaactccctgccctgtgtgctggagcagaagatctatccctatgaaatgctagtggtgaccaacaaggggcgaaccaagctgccaccgggggtggatcggatgcggcttgagaggcatctgtctgccgaggacttctcaagggtatttgccatgtcccctgaagagtttggcaagctggctctgtggaagcggaatgagctcaagaagaaggcctctctcttctgatggcccccacctgctccgggacggcccccttacccctgctgcttcagggtttttccccggcgggttgggaggggcaggaggtggggtggaaatagggtgggctcctttcctcaggtagagtggggggccaaaacctctgcagtccccggcagtgagctatggactttcttccccctcacaaggctgggggcctcctgctctcgtccctggccctccctgcacagggcaaagccagtctgggctctggcacacagagttcatgtttgcgccctctccctgcccctcaccccagagggtgaggaggaatgaggggcattggtggttaggccggttggctgtcttgaacagctggagggaagatgcaggggtgggaagcggccaggcaaaaagagctccaggctcttgtgtcgcccacccagccctccatactcactcctgacagctttcctgcactgcagcttcctgctcctctgantctagtggaanaggcccannctcancctccggcagggaagtcacccctccacttcacttgcctgacctccgctcgcaaacccnancttccaancttttnntccancctgngntttcccaaaaacctgggnttanggggaaatccccctanncnnatctggncctccnctgcttccagncccaaaatggaatttcnncnntaaccnggcnccggaaaaantggccttccccccnccnttnnaaggggcnaaagccanccnggnnatttngannncntggntaaaantttnnnttaanccnncccccccnaaaanttnttttnaaaaaaaattttttggggcccccnnnttttcnccnnnccn

SEQ ID NO: 269 - DNA, 256 bp, Homo Sapiens
ttcctcgtgccaacgtgtcttgtaaggtgcggctagaaactggggacatggcagcgcctggcccagcgctctgcctcttcgacgtggatgggaccctcaccgccccgcggcagaaaattaccaaagaaatggatgacttcctacaaaaattgaggcagaagatcaaaatcggagtggtaggcggatcggactttgagaaagtgcaggagcaactgggaaatgatgtggttgaaaaatacgattatgtgtttccaga

SEQ ID NO: 270 - DNA, 1197 bp, Homo Sapiens
  misc_feature (887)..(887): n is a, c, g, or t
  misc_feature (892)..(892): n is a, c, g, or t
  misc_feature (941)..(941): n is a, c, g, or t
  misc_feature (944)..(944): n is a, c, g, or t
  misc_feature (962)..(962): n is a, c, g, or t
  misc_feature (965)..(965): n is a, c, g, or t
  misc_feature (988)..(988): n is a, c, g, or t
  misc_feature (993)..(993): n is a, c, g, or t
  misc_feature (995)..(995): n is a, c, g, or t
  misc_feature (1003)..(1003): n is a, c, g, or t
  misc_feature (1009)..(1009): n is a, c, g, or t
  misc_feature (1011)..(1011): n is a, c, g, or t
  misc_feature (1026)..(1026): n is a, c, g, or t
  misc_feature (1029)..(1029): n is a, c, g, or t
  misc_feature (1038)..(1038): n is a, c, g, or t
  misc_feature (1061)..(1061): n is a, c, g, or t
  misc_feature (1065)..(1065): n is a, c, g, or t
  misc_feature (1086)..(1086): n is a, c, g, or t
  misc_feature (1108)..(1108): n is a, c, g, or t
  misc_feature (1110)..(1110): n is a, c, g, or t
  misc_feature (1113)..(1113): n is a, c, g, or t
  misc_feature (1127)..(1127): n is a, c, g, or t
  misc_feature (1133)..(1133): n is a, c, g, or t
  misc_feature (1155)..(1155): n is a, c, g, or t
  misc_feature (1158)..(1158): n is a, c, g, or t
  misc_feature (1160)..(1160): n is a, c, g, or t
  misc_feature (1166)..(1167): n is a, c, g, or t
  misc_feature (1171)..(1171): n is a, c, g, or t
tagagaaattactatgagaggatcgcatcaccatcaccatcacggatcctatttaggtgacactatagaatcgtcgacccacgcgtccggctccatcttcacgggcgcccaggaccctggcctgcagagacgctcccgccacaggatccagagcaagcaccgccccctggacgagcgggccctgcaggagaagctgaagtactttcctgtgtgtgtgagcaccaagccggagcccgaggacgatgcagaagagggacttgggggtcttcccagcaacatcagctctgtcagctccttgctgctcttcaacaccaccgagaacctgtacaagaagtatgtcttcctggaccccctggctggtgctgtaacaaagacccatgtgatgctgggggcagagacagaggagaagctgtttgatgcccccttgtccatcagcaagagagagcagctggaacagcaggtcccagagaactacttctatgtgccagacctgggccaggtgcctgagattgatgttccgtcctacctgcctgacctgcccggcattgccaacgacctcatgtacagtgccgacctgggccccggcattgccccctctgcccctggcaccattccggaactgcccaccttccacactgaggtagccgagcctctcaaggcagacctacaagatggggtactaacagcaccaccaccacccccaccgcccccaccacctcccccagctcctgaggtgctggccagtgcatccccactcccaccctcaaccgcggcccctgtaggccaaggcgccaggcaggacgacagcagcagcagcgcgtctccttcagtccagggagctcccagggaagtggtcgacccctccggtggccgggccactctgctanagtcnatccgccaagctggggggcatcggcaaggccaagctgcgcagcgtgaangancgaaagctggaaaaaaanaancaaaaggagcaggagcaagtganagccncnaccaaggnggggantngatgtcggatctctncancaagctggntcatgaagcccaagggcatctcntggnaaagactggggctgggagggncccggaaaacctttgcccggtntnaantcatcctctttgcnccccgnaaaaccaaggaaaaaagaaaanganantggaannctangggttcctgaaccttccccccaaaca

SEQ ID NO: 271 - DNA, 1474 bp, Homo Sapiens
  misc_feature (2)..(2): n is a, c, g, or t
  misc_feature (8)..(8): n is a, c, g, or t
  misc_feature (318)..(318): n is a, c, g, or t
  misc_feature (338)..(338): n is a, c, g, or t
  misc_feature (344)..(344): n is a, c, g, or t
  misc_feature (351)..(351): n is a, c, g, or t
  misc_feature (373)..(373): n is a, c, g, or t
  misc_feature (376)..(376): n is a, c, g, or t
  misc_feature (383)..(383): n is a, c, g, or t
  misc_feature (391)..(391): n is a, c, g, or t
  misc_feature (394)..(394): n is a, c, g, or t
  misc_feature (404)..(405): n is a, c, g, or t
  misc_feature (411)..(411): n is a, c, g, or t
  misc_feature (413)..(413): n is a, c, g, or t
  misc_feature (429)..(429): n is a, c, g, or t
  misc_feature (438)..(438): n is a, c, g, or t
  misc_feature (442)..(442): n is a, c, g, or t
  misc_feature (451)..(451): n is a, c, g, or t
  misc_feature (453)..(454): n is a, c, g, or t
  misc_feature (456)..(456): n is a, c, g, or t
  misc_feature (462)..(462): n is a, c, g, or t
  misc_feature (464)..(464): n is a, c, g, or t
  misc_feature (471)..(471): n is a, c, g, or t
  misc_feature (490)..(490): n is a, c, g, or t
  misc_feature (492)..(492): n is a, c, g, or t
  misc_feature (494)..(494): n is a, c, g, or t
  misc_feature (503)..(505): n is a, c, g, or t
  misc_feature (508)..(508): n is a, c, g, or t
  misc_feature (512)..(512): n is a, c, g, or t
  misc_feature (516)..(516): n is a, c, g, or t
  misc_feature (522)..(522): n is a, c, g, or t
  misc_feature (525)..(525): n is a, c, g, or t
  misc_feature (527)..(527): n is a, c, g, or t
  misc_feature (531)..(531): n is a, c, g, or t
  misc_feature (541)..(542): n is a, c, g, or t
  misc_feature (549)..(549): n is a, c, g, or t
  misc_feature (559)..(560): n is a, c, g, or t
  misc_feature (568)..(568): n is a, c, g, or t
  misc_feature (575)..(575): n is a, c, g, or t
  misc_feature (585)..(585): n is a, c, g, or t
  misc_feature (589)..(591): n is a, c, g, or t
  misc_feature (595)..(595): n is a, c, g, or t
  misc_feature (599)..(599): n is a, c, g, or t
  misc_feature (601)..(601): n is a, c, g, or t
  misc_feature (603)..(603): n is a, c, g, or t
  misc_feature (608)..(608): n is a, c, g, or t
  misc_feature (613)..(613): n is a, c, g, or t
  misc_feature (617)..(617): n is a, c, g, or t
  misc_feature (619)..(619): n is a, c, g, or t
  misc_feature (621)..(622): n is a, c, g, or t
  misc_feature (629)..(629): n is a, c, g, or t
  misc_feature (631)..(632): n is a, c, g, or t
  misc_feature (634)..(637): n is a, c, g, or t
  misc_feature (642)..(642): n is a, c, g, or t
  misc_feature (644)..(645): n is a, c, g, or t
  misc_feature (654)..(654): n is a, c, g, or t
  misc_feature (656)..(656): n is a, c, g, or t
  misc_feature (658)..(659): n is a, c, g, or t
  misc_feature (661)..(661): n is a, c, g, or t
  misc_feature (666)..(666): n is a, c, g, or t
  misc_feature (669)..(669): n is a, c, g, or t
  misc_feature (675)..(675): n is a, c, g, or t
  misc_feature (677)..(679): n is a, c, g, or t
  misc_feature (684)..(684): n is a, c, g, or t
  misc_feature (689)..(689): n is a, c, g, or t
  misc_feature (691)..(691): n is a, c, g, or t
  misc_feature (702)..(702): n is a, c, g, or t
  misc_feature (705)..(705): n is a, c, g, or t
  misc_feature (710)..(710): n is a, c, g, or t
  misc_feature (712)..(712): n is a, c, g, or t
  misc_feature (717)..(717): n is a, c, g, or t
  misc_feature (721)..(721): n is a, c, g, or t
  misc_feature (727)..(727): n is a, c, g, or t
  misc_feature (729)..(729): n is a, c, g, or t
  misc_feature (732)..(732): n is a, c, g, or t
  misc_feature (736)..(736): n is a, c, g, or t
  misc_feature (738)..(738): n is a, c, g, or t
  misc_feature (744)..(744): n is a, c, g, or t
  misc_feature (746)..(747): n is a, c, g, or t
  misc_feature (751)..(751): n is a, c, g, or t
  misc_feature (757)..(757): n is a, c, g, or t
  misc_feature (762)..(764): n is a, c, g, or t
  misc_feature (767)..(767): n is a, c, g, or t
  misc_feature (773)..(773): n is a, c, g, or t
  misc_feature (775)..(775): n is a, c, g, or t
  misc_feature (779)..(779): n is a, c, g, or t
  misc_feature (781)..(781): n is a, c, g, or t
  misc_feature (786)..(787): n is a, c, g, or t
  misc_feature (790)..(790): n is a, c, g, or t
  misc_feature (796)..(796): n is a, c, g, or t
  misc_feature (799)..(799): n is a, c, g, or t
  misc_feature (802)..(802): n is a, c, g, or t
  misc_feature (806)..(807): n is a, c, g, or t
  misc_feature (809)..(809): n is a, c, g, or t
  misc_feature (811)..(811): n is a, c, g, or t
  misc_feature (814)..(814): n is a, c, g, or t
  misc_feature (816)..(816): n is a, c, g, or t
  misc_feature (818)..(818): n is a, c, g, or t
  misc_feature (820)..(820): n is a, c, g, or t
  misc_feature (827)..(827): n is a, c, g, or t
  misc_feature (831)..(832): n is a, c, g, or t
  misc_feature (836)..(836): n is a, c, g, or t
  misc_feature (846)..(847): n is a, c, g, or t
  misc_feature (850)..(850): n is a, c, g, or t
  misc_feature (852)..(852): n is a, c, g, or t
  misc_feature (857)..(857): n is a, c, g, or t
  misc_feature (861)..(861): n is a, c, g, or t
  misc_feature (866)..(866): n is a, c, g, or t
  misc_feature (873)..(874): n is a, c, g, or t
  misc_feature (880)..(880): n is a, c, g, or t
  misc_feature (883)..(883): n is a, c, g, or t
  misc_feature (885)..(885): n is a, c, g, or t
  misc_feature (889)..(889): n is a, c, g, or t
  misc_feature (893)..(893): n is a, c, g, or t
  misc_feature (900)..(901): n is a, c, g, or t
  misc_feature (910)..(910): n is a, c, g, or t
  misc_feature (913)..(914): n is a, c, g, or t
  misc_feature (916)..(916): n is a, c, g, or t
  misc_feature (920)..(921): n is a, c, g, or t
  misc_feature (923)..(923): n is a, c, g, or t
  misc_feature (929)..(930): n is a, c, g, or t
  misc_feature (936)..(936): n is a, c, g, or t
  misc_feature (945)..(945): n is a, c, g, or t
  misc_feature (948)..(948): n is a, c, g, or t
  misc_feature (950)..(950): n is a, c, g, or t
  misc_feature (954)..(956): n is a, c, g, or t
  misc_feature (968)..(968): n is a, c, g, or t
  misc_feature (971)..(971): n is a, c, g, or t
  misc_feature (974)..(974): n is a, c, g, or t
  misc_feature (977)..(977): n is a, c, g, or t
  misc_feature (979)..(979): n is a, c, g, or t
  misc_feature (981)..(982): n is a, c, g, or t
  misc_feature (988)..(988): n is a, c, g, or t
  misc_feature (994)..(995): n is a, c, g, or t
  misc_feature (1000)..(1000): n is a, c, g, or t
  misc_feature (1003)..(1003): n is a, c, g, or t
  misc_feature (1005)..(1005): n is a, c, g, or t
  misc_feature (1014)..(1014): n is a, c, g, or t
  misc_feature (1018)..(1019): n is a, c, g, or t
  misc_feature (1023)..(1023): n is a, c, g, or t
  misc_feature (1025)..(1026): n is a, c, g, or t
  misc_feature (1029)..(1029): n is a, c, g, or t
  misc_feature (1034)..(1037): n is a, c, g, or t
  misc_feature (1040)..(1041): n is a, c, g, or t
  misc_feature (1045)..(1045): n is a, c, g, or t
  misc_feature (1047)..(1048): n is a, c, g, or t
  misc_feature (1058)..(1058): n is a, c, g, or t
  misc_feature (1063)..(1064): n is a, c, g, or t
  misc_feature (1068)..(1068): n is a, c, g, or t
  misc_feature (1076)..(1077): n is a, c, g, or t
  misc_feature (1080)..(1081): n is a, c, g, or t
  misc_feature (1086)..(1086): n is a, c, g, or t
  misc_feature (1092)..(1093): n is a, c, g, or t
  misc_feature (1097)..(1097): n is a, c, g, or t
  misc_feature (1101)..(1101): n is a, c, g, or t
  misc_feature (1105)..(1105): n is a, c, g, or t
  misc_feature (1108)..(1108): n is a, c, g, or t
  misc_feature (1112)..(1112): n is a, c, g, or t
  misc_feature (1115)..(1115): n is a, c, g, or t
  misc_feature (1119)..(1119): n is a, c, g, or t
  misc_feature (1121)..(1122): n is a, c, g, or t
  misc_feature (1128)..(1130): n is a, c, g, or t
  misc_feature (1135)..(1136): n is a, c, g, or t
  misc_feature (1139)..(1139): n is a, c, g, or t
  misc_feature (1145)..(1145): n is a, c, g, or t
  misc_feature (1147)..(1147): n is a, c, g, or t
  misc_feature (1149)..(1149): n is a, c, g, or t
  misc_feature (1169)..(1170): n is a, c, g, or t
  misc_feature (1172)..(1172): n is a, c, g, or t
  misc_feature (1177)..(1177): n is a, c, g, or t
  misc_feature (1179)..(1179): n is a, c, g, or t
  misc_feature (1183)..(1183): n is a, c, g, or t
  misc_feature (1189)..(1189): n is a, c, g, or t
  misc_feature (1195)..(1195): n is a, c, g, or t
  misc_feature (1200)..(1200): n is a, c, g, or t
  misc_feature (1202)..(1203): n is a, c, g, or t
  misc_feature (1206)..(1207): n is a, c, g, or t
  misc_feature (1209)..(1209): n is a, c, g, or t
  misc_feature (1211)..(1212): n is a, c, g, or t
  misc_feature (1217)..(1217): n is a, c, g, or t
  misc_feature (1222)..(1222): n is a, c, g, or t
  misc_feature (1227)..(1227): n is a, c, g, or t
  misc_feature (1234)..(1234): n is a, c, g, or t
  misc_feature (1249)..(1249): n is a, c, g, or t
  misc_feature (1264)..(1265): n is a, c, g, or t
  misc_feature (1267)..(1267): n is a, c, g, or t
  misc_feature (1271)..(1271): n is a, c, g, or t
  misc_feature (1278)..(1278): n is a, c, g, or t
  misc_feature (1283)..(1283): n is a, c, g, or t
  misc_feature (1286)..(1287): n is a, c, g, or t
  misc_feature (1292)..(1292): n is a, c, g, or t
  misc_feature (1297)..(1297): n is a, c, g, or t
  misc_feature (1311)..(1311): n is a, c, g, or t
  misc_feature (1319)..(1320): n is a, c, g, or t
  misc_feature (1323)..(1323): n is a, c, g, or t
  misc_feature (1326)..(1326): n is a, c, g, or t
  misc_feature (1328)..(1328): n is a, c, g, or t
  misc_feature (1330)..(1332): n is a, c, g, or t
  misc_feature (1334)..(1334): n is a, c, g, or t
  misc_feature (1339)..(1341): n is a, c, g, or t
  misc_feature (1344)..(1344): n is a, c, g, or t
  misc_feature (1351)..(1351): n is a, c, g, or t
  misc_feature (1361)..(1361): n is a, c, g, or t
  misc_feature (1369)..(1373): n is a, c, g, or t
  misc_feature (1382)..(1382): n is a, c, g, or t
  misc_feature (1399)..(1399): n is a, c, g, or t
  misc_feature (1402)..(1402): n is a, c, g, or t
  misc_feature (1407)..(1407): n is a, c, g, or t
  misc_feature (1409)..(1409): n is a, c, g, or t
  misc_feature (1412)..(1412): n is a, c, g, or t
  misc_feature (1414)..(1414): n is a, c, g, or t
  misc_feature (1416)..(1416): n is a, c, g, or t
  misc_feature (1419)..(1419): n is a, c, g, or t
  misc_feature (1422)..(1422): n is a, c, g, or t
  misc_feature (1424)..(1426): n is a, c, g, or t
  misc_feature (1435)..(1435): n is a, c, g, or t
  misc_feature (1439)..(1439): n is a, c, g, or t
  misc_feature (1447)..(1447): n is a, c, g, or t
  misc_feature (1459)..(1460): n is a, c, g, or t
  misc_feature (1467)..(1467): n is a, c, g, or t
  misc_feature (1469)..(1469): n is a, c, g, or t
anattaantagagaaattactatgagaggatcgcatcaccatcaccatcacgggatcctatttaggtgacactatagaatcgtcgacccacgcgtccgagcgccgcagcctcgccagctcgccccggcactgcgcacttgccagccagtccgcccgtccggagcccggctcgctggggcagcatggaggggtcgccgctgctctgggggccgcgggccgggggcgtcggccttttggtgctgctgctgctcggcctgtttcggccgccccccgcgctctgcgcgcggccggtaaaggagccccgcggcctaagcgcancgtctccgcccttggctganactggngctcctngccgcttccggcggtcaatgcnccnaggtgangcggcggnggnggtgcagganntggagngngcgctggagcatctgntggaggacnaacntaatgagcngnngngggccnangctcagnatgatgaagatcaacatgntncncttcctggnnnaantgcngaangtaatnggnancccnccatcaactnngatcatngtttctgggnntggacaantatcttncactcatatncagnnnaaantcgntnangttcntgctncacnanannattttgnanntnnnncattncnnataacaaanangnntnaaaangcncaaacnannntctantgatntnttctaataatnatncctangntctantaantaatananatncttntnttatantnnattnctttangaatnnnaancaaaantnaaantnaaccnnaangtttgnaanttncaanntnanaananantnttttgantggnnaatntaaatttttnntananaaatnatgnaattnccttaanngagagnaantnttanccancaaaatnnttaagtttnttnnancaannanaatatnntaaaantaaattaanttngntccnnnaattgcctaaanttnatncancntnnatatantattannaaaanatntnaaaaattcntttnntatnannatntttannnnaannaatncnntatttaaaanaaacnntaanaaacatannatnnttatntacgtnntctnaaanaaantanaaanatngttntnnattttnnnccccnnaanaataanantntttatgaaataaaaaaatannancatantnattnatgttnaaaaanatatntnnttnntnannaatanttaantaatncctttantccttaattagaaanataattttataacanntnttanaataatnttatnatnntacanattcnattttttaatatanataaaatnntantcnanannntntttannngantctaaanttattctttngaagagtnnnnnattcatacnttaaaataaaatatatntcntttangnaantntntanaantnnntataaattnattnctttatanaaatatataaannatataananagata

SEQ ID NO: 272 - DNA, 1289 bp, Homo Sapiens
  misc_feature (2)..(2): n is a, c, g, or t
  misc_feature (801)..(801): n is a, c, g, or t
  misc_feature (809)..(809): n is a, c, g, or t
  misc_feature (819)..(819): n is a, c, g, or t
  misc_feature (858)..(858): n is a, c, g, or t
  misc_feature (866)..(866): n is a, c, g, or t
  misc_feature (899)..(899): n is a, c, g, or t
  misc_feature (901)..(901): n is a, c, g, or t
  misc_feature (911)..(911): n is a, c, g, or t
  misc_feature (915)..(915): n is a, c, g, or t
  misc_feature (923)..(923): n is a, c, g, or t
  misc_feature (925)..(925): n is a, c, g, or t
  misc_feature (929)..(929): n is a, c, g, or t
  misc_feature (934)..(934): n is a, c, g, or t
  misc_feature (941)..(941): n is a, c, g, or t
  misc_feature (943)..(943): n is a, c, g, or t
  misc_feature (968)..(968): n is a, c, g, or t
  misc_feature (978)..(978): n is a, c, g, or t
  misc_feature (984)..(984): n is a, c, g, or t
  misc_feature (986)..(986): n is a, c, g, or t
  misc_feature (999)..(999): n is a, c, g, or t
  misc_feature (1002)..(1002): n is a, c, g, or t
  misc_feature (1006)..(1006): n is a, c, g, or t
  misc_feature (1011)..(1011): n is a, c, g, or t
  misc_feature (1014)..(1016): n is a, c, g, or t
  misc_feature (1018)..(1019): n is a, c, g, or t
  misc_feature (1022)..(1022): n is a, c, g, or t
  misc_feature (1032)..(1033): n is a, c, g, or t
  misc_feature (1035)..(1035): n is a, c, g, or t
  misc_feature (1042)..(1042): n is a, c, g, or t
  misc_feature (1072)..(1072): n is a, c, g, or t
  misc_feature (1082)..(1082): n is a, c, g, or t
  misc_feature (1091)..(1091): n is a, c, g, or t
  misc_feature (1100)..(1100): n is a, c, g, or t
  misc_feature (1103)..(1103): n is a, c, g, or t
  misc_feature (1126)..(1126): n is a, c, g, or t
  misc_feature (1142)..(1142): n is a, c, g, or t
  misc_feature (1146)..(1146): n is a, c, g, or t
  misc_feature (1148)..(1148): n is a, c, g, or t
  misc_feature (1150)..(1150): n is a, c, g, or t
  misc_feature (1152)..(1152): n is a, c, g, or t
  misc_feature (1159)..(1159): n is a, c, g, or t
  misc_feature (1162)..(1162): n is a, c, g, or t
  misc_feature (1165)..(1165): n is a, c, g, or t
  misc_feature (1176)..(1177): n is a, c, g, or t
  misc_feature (1180)..(1180): n is a, c, g, or t
  misc_feature (1192)..(1192): n is a, c, g, or t
  misc_feature (1196)..(1196): n is a, c, g, or t
  misc_feature (1206)..(1207): n is a, c, g, or t
  misc_feature (1209)..(1209): n is a, c, g, or t
  misc_feature (1213)..(1213): n is a, c, g, or t
  misc_feature (1217)..(1220): n is a, c, g, or t
  misc_feature (1225)..(1226): n is a, c, g, or t
  misc_feature (1232)..(1233): n is a, c, g, or t
  misc_feature (1237)..(1238): n is a, c, g, or t
  misc_feature (1241)..(1241): n is a, c, g, or t
  misc_feature (1246)..(1246): n is a, c, g, or t
  misc_feature (1250)..(1250): n is a, c, g, or t
  misc_feature (1255)..(1255): n is a, c, g, or t
  misc_feature (1261)..(1261): n is a, c, g, or t
  misc_feature (1267)..(1268): n is a, c, g, or t
  misc_feature (1271)..(1271): n is a, c, g, or t
  misc_feature (1273)..(1274): n is a, c, g, or t
  misc_feature (1280)..(1281): n is a, c, g, or t
  misc_feature (1283)..(1284): n is a, c, g, or t
  misc_feature (1286)..(1286): n is a, c, g, or t
tnctatgagaggatcgcatcaccatcaccatcacgggatcctatttaggtgacactatagaatcgtcgacccacgcgtccgagacacttccggttgcgacggaggtaggcttacgaggcctgtgtcgggtagaaagggtccttcctggaccgggaccctctgccacgaccatggaccgtaggaaaaagcctttggacgtcacggcctcctcgttggtagatcttaaggctgaactcttccgaaagcaagaagaattcaaacaagaaaaacttctaaaagattctggagtttttggaaaaccaaaaacaactaacaagaaaccaagtatctggagcaaacagaatgtaggcgtttcaaatcgagctgagaaggatgctgaacagaagattgaagaacagaagactttagacaaagcaagggaaaaattggaagaaaaagccaaattatatgaaaaaatgactaaaggagactttatagatgaagaagtagaggatatgtaccttgtggatttcacacagaagatcatagacaagcgcaaagaaatggaggcatctggtgcccatagagattctcaaaaggcaggagaaagggacgacgatgaggaaaaccttcctgagggagagatccctcctccccaagaccccagtgaagaatgggtggattacgtggactctttggggcgttcccggcgctgtatgagaaaggatttgccagatctgctggagatggataaaaatcttcaggggagactgtaagtgtgtgtggtatacagagctctgccaaggtctgaaaatgcagccncagggatngttttgtganggggaggctgttttataattaatgatctctgttgctccngtaagganatattgattgattgattgattgatggattggancnctttttaagnggtnagcatgcncntccnccccntaatccncncttggggaacaaccctgactggggnatgaataaanctgtcncntttttacttgganggntgtnggccnccnnntnnccnaataaccccnncngaacccnccaaccccggcttttggggaaaacaagggntttgaaaaanacccttgantttcccccnaanagggggcccccgggaaaaaactnaccccctttttctttnggancntngnctttttnaanaanggcccttaaannaanttttccccgggncctnaacctaaaanntncttnaaannnnaaccnnaaaaanncccnnaanccccngggnaaaantccccnttcccnnagnanntttttnngnnanggg

SEQ ID NO: 273 - DNA, 1508 bp, Homo Sapiens
  misc_feature (1)..(1): n is a, c, g, or t
  misc_feature (3)..(8): n is a, c, g, or t
  misc_feature (11)..(11): n is a, c, g, or t
  misc_feature (13)..(14): n is a, c, g, or t
  misc_feature (312)..(312): n is a, c, g, or t
  misc_feature (333)..(333): n is a, c, g, or t
  misc_feature (356)..(356): n is a, c, g, or t
  misc_feature (380)..(380): n is a, c, g, or t
  misc_feature (387)..(387): n is a, c, g, or t
  misc_feature (419)..(419): n is a, c, g, or t
  misc_feature (446)..(446): n is a, c, g, or t
  misc_feature (454)..(454): n is a, c, g, or t
  misc_feature (464)..(464): n is a, c, g, or t
  misc_feature (479)..(479): n is a, c, g, or t
  misc_feature (506)..(506): n is a, c, g, or t
  misc_feature (508)..(508): n is a, c, g, or t
  misc_feature (531)..(531): n is a, c, g, or t
  misc_feature (545)..(545): n is a, c, g, or t
  misc_feature (551)..(551): n is a, c, g, or t
  misc_feature (556)..(558): n is a, c, g, or t
  misc_feature (567)..(567): n is a, c, g, or t
  misc_feature (588)..(589): n is a, c, g, or t
  misc_feature (600)..(600): n is a, c, g, or t
  misc_feature (604)..(604): n is a, c, g, or t
  misc_feature (611)..(612): n is a, c, g, or t
  misc_feature (616)..(616): n is a, c, g, or t
  misc_feature (619)..(619): n is a, c, g, or t
  misc_feature (627)..(627): n is a, c, g, or t
  misc_feature (634)..(634): n is a, c, g, or t
  misc_feature (636)..(636): n is a, c, g, or t
  misc_feature (639)..(642): n is a, c, g, or t
  misc_feature (644)..(644): n is a, c, g, or t
  misc_feature (646)..(646): n is a, c, g, or t
  misc_feature (654)..(654): n is a, c, g, or t
  misc_feature (664)..(664): n is a, c, g, or t
  misc_feature (670)..(670): n is a, c, g, or t
  misc_feature (678)..(678): n is a, c, g, or t
  misc_feature (680)..(680): n is a, c, g, or t
  misc_feature (684)..(684): n is a, c, g, or t
  misc_feature (690)..(690): n is a, c, g, or t
  misc_feature (697)..(698): n is a, c, g, or t
  misc_feature (704)..(706): n is a, c, g, or t
  misc_feature (708)..(708): n is a, c, g, or t
  misc_feature (715)..(715): n is a, c, g, or t
  misc_feature (722)..(722): n is a, c, g, or t
  misc_feature (729)..(729): n is a, c, g, or t
  misc_feature (736)..(736): n is a, c, g, or t
  misc_feature (738)..(738): n is a, c, g, or t
  misc_feature (740)..(740): n is a, c, g, or t
  misc_feature (742)..(742): n is a, c, g, or t
  misc_feature (748)..(748): n is a, c, g, or t
  misc_feature (752)..(752): n is a, c, g, or t
  misc_feature (755)..(755): n is a, c, g, or t
  misc_feature (758)..(759): n is a, c, g, or t
  misc_feature (767)..(767): n is a, c, g, or t
  misc_feature (772)..(772): n is a, c, g, or t
  misc_feature (774)..(774): n is a, c, g, or t
  misc_feature (782)..(782): n is a, c, g, or t
  misc_feature (785)..(786): n is a, c, g, or t
  misc_feature (788)..(788): n is a, c, g, or t
  misc_feature (791)..(791): n is a, c, g, or t
  misc_feature (796)..(797): n is a, c, g, or t
  misc_feature (805)..(805): n is a, c, g, or t
  misc_feature (811)..(811): n is a, c, g, or t
  misc_feature (820)..(820): n is a, c, g, or t
  misc_feature (826)..(828): n is a, c, g, or t
  misc_feature (831)..(831): n is a, c, g, or t
  misc_feature (838)..(838): n is a, c, g, or t
  misc_feature (842)..(842): n is a, c, g, or t
  misc_feature (847)..(848): n is a, c, g, or t
  misc_feature (850)..(850): n is a, c, g, or t
  misc_feature (855)..(855): n is a, c, g, or t
  misc_feature (857)..(859): n is a, c, g, or t
  misc_feature (864)..(864): n is a, c, g, or t
  misc_feature (866)..(866): n is a, c, g, or t
  misc_feature (868)..(868): n is a, c, g, or t
  misc_feature (871)..(871): n is a, c, g, or t
  misc_feature (878)..(879): n is a, c, g, or t
  misc_feature (888)..(889): n is a, c, g, or t
  misc_feature (891)..(891): n is a, c, g, or t
  misc_feature (894)..(894): n is a, c, g, or t
  misc_feature (907)..(907): n is a, c, g, or t
  misc_feature (911)..(911): n is a, c, g, or t
  misc_feature (917)..(919): n is a, c, g, or t
  misc_feature (922)..(922): n is a, c, g, or t
  misc_feature (928)..(931): n is a, c, g, or t
  misc_feature (933)..(933): n is a, c, g, or t
  misc_feature (940)..(940): n is a, c, g, or t
  misc_feature (942)..(942): n is a, c, g, or t
  misc_feature (948)..(948): n is a, c, g, or t
  misc_feature (950)..(950): n is a, c, g, or t
  misc_feature (953)..(953): n is a, c, g, or t
  misc_feature (963)..(963): n is a, c, g, or t
  misc_feature (968)..(969): n is a, c, g, or t
  misc_feature (972)..(972): n is a, c, g, or t
  misc_feature (974)..(976): n is a, c, g, or t
  misc_feature (978)..(978): n is a, c, g, or t
  misc_feature (988)..(989): n is a, c, g, or t
  misc_feature (995)..(995): n is a, c, g, or t
  misc_feature (997)..(997): n is a, c, g, or t
  misc_feature (1008)..(1008): n is a, c, g, or t
  misc_feature (1010)..(1010): n is a, c, g, or t
  misc_feature (1012)..(1014): n is a, c, g, or t
  misc_feature (1021)..(1021): n is a, c, g, or t
  misc_feature (1028)..(1028): n is a, c, g, or t
  misc_feature (1032)..(1032): n is a, c, g, or t
  misc_feature (1041)..(1041): n is a, c, g, or t
  misc_feature (1049)..(1051): n is a, c, g, or t
  misc_feature (1057)..(1057): n is a, c, g, or t
  misc_feature (1068)..(1068): n is a, c, g, or t
  misc_feature (1080)..(1080): n is a, c, g, or t
  misc_feature (1085)..(1085): n is a, c, g, or t
  misc_feature (1088)..(1089): n is a, c, g, or t
  misc_feature (1091)..(1091): n is a, c, g, or t
  misc_feature (1099)..(1100): n is a, c, g, or t
  misc_feature (1102)..(1103): n is a, c, g, or t
  misc_feature (1109)..(1109): n is a, c, g, or t
  misc_feature (1113)..(1113): n is a, c, g, or t
  misc_feature (1115)..(1115): n is a, c, g, or t
  misc_feature (1128)..(1128): n is a, c, g, or t
  misc_feature (1131)..(1131): n is a, c, g, or t
  misc_feature (1134)..(1134): n is a, c, g, or t
  misc_feature (1140)..(1140): n is a, c, g, or t
  misc_feature (1142)..(1144): n is a, c, g, or t
  misc_feature (1149)..(1149): n is a, c, g, or t
  misc_feature (1156)..(1156): n is a, c, g, or t
  misc_feature (1160)..(1160): n is a, c, g, or t
  misc_feature (1163)..(1163): n is a, c, g, or t
  misc_feature (1170)..(1170): n is a, c, g, or t
  misc_feature (1174)..(1175): n is a, c, g, or t
  misc_feature (1180)..(1180): n is a, c, g, or t
  misc_feature (1186)..(1186): n is a, c, g, or t
  misc_feature (1188)..(1189): n is a, c, g, or t
  misc_feature (1213)..(1213): n is a, c, g, or t
  misc_feature (1216)..(1216): n is a, c, g, or t
  misc_feature (1221)..(1221): n is a, c, g, or t
  misc_feature (1225)..(1225): n is a, c, g, or t
  misc_feature (1229)..(1230): n is a, c, g, or t
  misc_feature (1233)..(1233): n is a, c, g, or t
  misc_feature (1236)..(1237): n is a, c, g, or t
  misc_feature (1242)..(1242): n is a, c, g, or t
  misc_feature (1244)..(1244): n is a, c, g, or t
  misc_feature (1255)..(1255): n is a, c, g, or t
  misc_feature (1258)..(1259): n is a, c, g, or t
  misc_feature (1264)..(1264): n is a, c, g, or t
  misc_feature (1271)..(1272): n is a, c, g, or t
  misc_feature (1274)..(1274): n is a, c, g, or t
  misc_feature (1276)..(1276): n is a, c, g, or t
  misc_feature (1279)..(1279): n is a, c, g, or t
  misc_feature (1283)..(1283): n is a, c, g, or t
  misc_feature (1285)..(1285): n is a, c, g, or t
  misc_feature (1287)..(1287): n is a, c, g, or t
  misc_feature (1290)..(1290): n is a, c, g, or t
  misc_feature (1296)..(1296): n is a, c, g, or t
  misc_feature (1299)..(1299): n is a, c, g, or t
  misc_feature (1307)..(1309): n is a, c, g, or t
  misc_feature (1313)..(1313): n is a, c, g, or t
  misc_feature (1315)..(1315): n is a, c, g, or t
  misc_feature (1321)..(1321): n is a, c, g, or t
  misc_feature (1327)..(1327): n is a, c, g, or t
  misc_feature (1331)..(1331): n is a, c, g, or t
  misc_feature (1333)..(1334): n is a, c, g, or t
  misc_feature (1338)..(1338): n is a, c, g, or t
  misc_feature (1348)..(1350): n is a, c, g, or t
  misc_feature (1353)..(1353): n is a, c, g, or t
  misc_feature (1356)..(1356): n is a, c, g, or t
  misc_feature (1359)..(1359): n is a, c, g, or t
  misc_feature (1365)..(1365): n is a, c, g, or t
  misc_feature (1367)..(1367): n is a, c, g, or t
  misc_feature (1375)..(1375): n is a, c, g, or t
  misc_feature (1377)..(1377): n is a, c, g, or t
  misc_feature (1379)..(1379): n is a, c, g, or t
  misc_feature (1390)..(1390): n is a, c, g, or t
  misc_feature (1392)..(1392): n is a, c, g, or t
  misc_feature (1396)..(1396): n is a, c, g, or t
  misc_feature (1400)..(1400): n is a, c, g, or t
  misc_feature (1403)..(1406): n is a, c, g, or t
  misc_feature (1408)..(1408): n is a, c, g, or t
  misc_feature (1410)..(1410): n is a, c, g, or t
  misc_feature (1413)..(1414): n is a, c, g, or t
  misc_feature (1427)..(1427): n is a, c, g, or t
  misc_feature (1432)..(1434): n is a, c, g, or t
  misc_feature (1438)..(1439): n is a, c, g, or t
  misc_feature (1444)..(1444): n is a, c, g, or t
  misc_feature (1453)..(1453): n is a, c, g, or t
  misc_feature (1455)..(1456): n is a, c, g, or t
  misc_feature (1462)..(1464): n is a, c, g, or t
  misc_feature (1466)..(1466): n is a, c, g, or t
  misc_feature (1482)..(1482): n is a, c, g, or t
  misc_feature (1489)..(1489): n is a, c, g, or t
  misc_feature (1491)..(1491): n is a, c, g, or t
  misc_feature (1495)..(1495): n is a, c, g, or t
  misc_feature (1501)..(1501): n is a, c, g, or t
  misc_feature (1507)..(1507): n is a, c, g, or t
ntnnnnnncantnnaggaaattactatgagaggatcgcatcaccatcaccattcacggatcctatttaggtgacacatatagaatcgtcgacccacgcgctccgctagttctagatcgcgagcggccgccgccgccgccgcctccgccgccctccgctccgctcggctcgggctcggctcgggcgcgggcgcggggcgcggggctgggcccgggcggaacggcggctgctccggacatgtcgggccctcgcgccggcttctaccggcaggagctgaacaagaccgtgtgggaggtgccgcatcggctgcagnggctgcgcccggtgggctccngcgcctacggctccgtctgttcngcctacgacgcccggctgctccanaaggtgncggtgaagaagctgtcgcgccccttccagtcnctgatccacgcgcgcagaacgtaccgngagctgcngctgctcaancacctgaatcacganaaagtacttggtgaccaccctgatggncnccgacctgaacaacatcgtcaantgccaggcgctganacgacnagcannntcaattccnggtttaccaatctgctgcacnnaatggaattanatcnactcggnngggnatnatccaccnggaaacntnaannnnancnacgtgacntgtgaactancgactntaaagctnangatntttgtnattttanngttgannngncatttcngaacgangactatnaccgagntnangntggacnccgnagntgnnttacccgnggtancntgaaaaantanngnttnaattnnaaatgcanttaacnatccaaaancaaaannntantctggtnttantggcnngncattnannnattanancnaantccaagnnaaaaaaacnntnttntagaaaaataganaaantttacnnnagntataannnncnaattctngnaatatntnatnccaaaatttntcttnnttnannnancagacaaaannaatctncnttaaaaaaaantntnnnagaatanaaaatanagancacttcccnctcaatannntacaanaaaaaaatttnaacaaccaatcnttctnaanntnatacaatnngnnatgatnaaantnaaaattatttganaanaanttttanannntagancaatganaccnaancgtaaanattnnttaancatatntnntatgtgataagttaattattcttnttnggaantcgnaacnntantanntatancntaaatctcttnctnntattnaataaannananatncttntnanacntctccnaantttagatnnnttantnaaatantctctntatntnnatantagtattaannntcntcntanataaananttcataantntnatcttactagntnctanattnttnnnntnanatnncaaaaataattanaaatnnntaanncacanaaatttaanannttatcnnntnaattattaataaatgntaataantngaanaattcntttatna

SEQ ID NO: 274 - DNA, 1226 bp, Homo Sapiens
  misc_feature (944)..(944): n is a, c, g, or t
  misc_feature (952)..(952): n is a, c, g, or t
  misc_feature (958)..(958): n is a, c, g, or t
  misc_feature (965)..(965): n is a, c, g, or t
  misc_feature (971)..(971): n is a, c, g, or t
  misc_feature (988)..(988): n is a, c, g, or t
  misc_feature (995)..(995): n is a, c, g, or t
  misc_feature (1010)..(1010): n is a, c, g, or t
  misc_feature (1033)..(1034): n is a, c, g, or t
  misc_feature (1047)..(1047): n is a, c, g, or t
  misc_feature (1056)..(1056): n is a, c, g, or t
  misc_feature (1069)..(1069): n is a, c, g, or t
  misc_feature (1077)..(1077): n is a, c, g, or t
  misc_feature (1080)..(1090): n is a, c, g, or t
  misc_feature (1093)..(1094): n is a, c, g, or t
  misc_feature (1097)..(1097): n is a, c, g, or t
  misc_feature (1100)..(1103): n is a, c, g, or t
  misc_feature (1107)..(1107): n is a, c, g, or t
  misc_feature (1110)..(1110): n is a, c, g, or t
  misc_feature (1112)..(1122): n is a, c, g, or t
  misc_feature (1124)..(1124): n is a, c, g, or t
  misc_feature (1127)..(1142): n is a, c, g, or t
  misc_feature (1144)..(1154): n is a, c, g, or t
  misc_feature (1156)..(1160): n is a, c, g, or t
  misc_feature (1162)..(1177): n is a, c, g, or t
  misc_feature (1182)..(1226): n is a, c, g, or t
tagagaaattactatgagaggatcgcatcaccatcaccatcacggatcctatttaggtgacactatagaatcgtcgacccacgcgtccgcccagccagcgcccgcgatgactgccactctccgcccctacctgagtgccgtgcgggccacattgcaggctgccctctgcctggagaacttctcctcccaggttgtggaacgacacaacaagccggaagtggaagtcaggagtagcaaagagctcctgttacaacctgtgaccatcagcaggaatgagaaggaaaaggttctgattgagggctccatcaactctgtccgggtcagcattgctgtgaaacaggctgatgagatcgagaagattttgtgccacaagttcatgcgcttcatgatgatgcgagcagagaacttctttatccttcgaaggaagcctgtggaggggtatgatatcagctttctgatcaccaacttccacacagagcagatgtacaaacacaagttggtggactttgtgatccacttcatggaggagattgacaaggagatcagtgagatgaagctgtcagtcaatgcccgtgcccgcattgtggctgaagagttccttaagaatttttaaaccatctggctggatctcgtggccttccccctcagactacccatgtctccacgaaggcgtcctggagtcactccccgagcagcgcggcggcggcagggagttgggttggggtgggcatttgatgcgggaggtgggtggtgtgcttgctagctgggcaagaaagcagcagtggacctgccccaaggccacacgtgcctggtcaggctggcttctgatgttcagtcccctgggccgggacagatttttttaacgtcttgaaacttaaactctgtgcttgtaggatactgtaacctttttggcctttttttttttttttttttttaaacccccncctccagnggctgngactggncccagngattatacgttattggnttgctgnggggtctggggcggncctggaacccaaaaaggcaactnnttttttccccctntgccccccngggggggaagggnaggggggnttnnnnnnnnnnnttnnccnttnnnntttnttncnnnnnnnnnnngnccnnnnnnnnnnnnnnnnannnnnnnnnnntnnnnnannnnnnnnnnnnnnnnccccnnnnnnnnnnnnnnnnnnnnnnnnnnnnnnnnnnnnnnnnnnnnn

SEQ ID NO: 275 - DNA, 1204 bp, Homo Sapiens
  misc_feature (862)..(862): n is a, c, g, or t
  misc_feature (892)..(892): n is a, c, g, or t
  misc_feature (920)..(920): n is a, c, g, or t
  misc_feature (927)..(927): n is a, c, g, or t
  misc_feature (935)..(935): n is a, c, g, or t
  misc_feature (946)..(946): n is a, c, g, or t
  misc_feature (949)..(949): n is a, c, g, or t
  misc_feature (973)..(973): n is a, c, g, or t
  misc_feature (975)..(975): n is a, c, g, or t
  misc_feature (978)..(978): n is a, c, g, or t
  misc_feature (981)..(981): n is a, c, g, or t
  misc_feature (988)..(988): n is a, c, g, or t
  misc_feature (993)..(993): n is a, c, g, or t
  misc_feature (995)..(997): n is a, c, g, or t
  misc_feature (1002)..(1002): n is a, c, g, or t
  misc_feature (1011)..(1011): n is a, c, g, or t
  misc_feature (1015)..(1015): n is a, c, g, or t
  misc_feature (1017)..(1017): n is a, c, g, or t
  misc_feature (1024)..(1024): n is a, c, g, or t
  misc_feature (1028)..(1028): n is a, c, g, or t
  misc_feature (1037)..(1037): n is a, c, g, or t
  misc_feature (1041)..(1041): n is a, c, g, or t
  misc_feature (1049)..(1049): n is a, c, g, or t
  misc_feature (1052)..(1052): n is a, c, g, or t
  misc_feature (1055)..(1055): n is a, c, g, or t
  misc_feature (1064)..(1064): n is a, c, g, or t
  misc_feature (1067)..(1067): n is a, c, g, or t
  misc_feature (1072)..(1072): n is a, c, g, or t
  misc_feature (1078)..(1078): n is a, c, g, or t
  misc_feature (1081)..(1081): n is a, c, g, or t
  misc_feature (1083)..(1083): n is a, c, g, or t
  misc_feature (1089)..(1089): n is a, c, g, or t
  misc_feature (1111)..(1111): n is a, c, g, or t
  misc_feature (1114)..(1115): n is a, c, g, or t
  misc_feature (1117)..(1118): n is a, c, g, or t
  misc_feature (1121)..(1121): n is a, c, g, or t
  misc_feature (1127)..(1127): n is a, c, g, or t
  misc_feature (1148)..(1148): n is a, c, g, or t
  misc_feature (1151)..(1151): n is a, c, g, or t
  misc_feature (1157)..(1158): n is a, c, g, or t
  misc_feature (1165)..(1166): n is a, c, g, or t
  misc_feature (1194)..(1194): n is a, c, g, or t
  misc_feature (1196)..(1196): n is a, c, g, or t
  misc_feature (1201)..(1201): n is a, c, g, or t
tagaggaaattacctatgagaggatcgcatcaccatcaccatcacggatcctatttaggtgacactatagaatcgtcgacccacgcgtccgcaaatatggaaactcgttactttgcaaagaagaaaacccttcttggcttgagtaaattggctgcattagcttcagacttttcagaggatatgctacaagaaaaaattgaagaaatggctgagcaggagcgctttctactgcatcaggagaccctacctgaacagctgctggcggagaaacagctaaatctcagtgcgatgccagtattgactgcaccacaactcattggtctatatatctgtgaagaaaatagaagagctaatgaatatgatttcaagaaagctttggacttgttggaatatattgatgaggaagaagatataaatataaatgatctaaaactggaaatcctttgcaaagctcttcagagagataactggtccagttctgatggcaaagatgatccaattgaagtatctaaagacagtatatttgtgaagatcttacagaaacttttaaaagatggcattcagctcagtgagtacttaccggaggtgaaagacctgctacaagcggatcagcttggaagcttaaagtccaatccttacttcgagtttgttttgaaagcaaattatgaatattatgttcagggacaaatataactttttctaaaaatggccattgtttatgaaatctgtataagtgtgtccttatacaaattttaggccataaacaagtgtaagtttgtacaatttcataacatgtatagctgagtttttatactttatatgtaggaagctaatataaaatagttatgtaactgtgattttnggtttccagttatgtgactggttttttccncctgaaatgtgtcagttgttgttcctgnactcggngcccttcnttttactctcncgnggtcccaggttctggagttctggncnggntcnagctgcncccangnnnaatcncttctaggncccngnttctgcnactntgaaaaacnaagnagaggggnccnacncctgggacntgnaaccngagaanccntngggacnttttaacttttcccctaataanaanngnnccnatggangtaaaaaaaaaaaaaaagggngcncccccnnaggggcnnaataacctaataccggactgggccccgngnaaaancca

SEQ ID NO: 276 - DNA, 1427 bp, Homo Sapiens
  misc_feature (1)..(1): n is a, c, g, or t
  misc_feature (816)..(816): n is a, c, g, or t
  misc_feature (824)..(824): n is a, c, g, or t
  misc_feature (832)..(832): n is a, c, g, or t
  misc_feature (838)..(841): n is a, c, g, or t
  misc_feature (843)..(843): n is a, c, g, or t
  misc_feature (846)..(846): n is a, c, g, or t
  misc_feature (853)..(853): n is a, c, g, or t
  misc_feature (857)..(857): n is a, c, g, or t
  misc_feature (859)..(864): n is a, c, g, or t
  misc_feature (866)..(866): n is a, c, g, or t
  misc_feature (868)..(868): n is a, c, g, or t
  misc_feature (873)..(873): n is a, c, g, or t
  misc_feature (877)..(877): n is a, c, g, or t
  misc_feature (879)..(879): n is a, c, g, or t
  misc_feature (882)..(884): n is a, c, g, or t
  misc_feature (886)..(886): n is a, c, g, or t
  misc_feature (890)..(890): n is a, c, g, or t
  misc_feature (892)..(892): n is a, c, g, or t
  misc_feature (899)..(899): n is a, c, g, or t
  misc_feature (901)..(901): n is a, c, g, or t
  misc_feature (903)..(903): n is a, c, g, or t
  misc_feature (905)..(907): n is a, c, g, or t
  misc_feature (909)..(921): n is a, c, g, or t
  misc_feature (925)..(930): n is a, c, g, or t
  misc_feature (933)..(934): n is a, c, g, or t
  misc_feature (936)..(939): n is a, c, g, or t
  misc_feature (941)..(941): n is a, c, g, or t
  misc_feature (943)..(944): n is a, c, g, or t
  misc_feature (946)..(946): n is a, c, g, or t
  misc_feature (949)..(949): n is a, c, g, or t
  misc_feature (951)..(951): n is a, c, g, or t
  misc_feature (953)..(953): n is a, c, g, or t
  misc_feature (955)..(955): n is a, c, g, or t
  misc_feature (957)..(957): n is a, c, g, or t
  misc_feature (962)..(962): n is a, c, g, or t
  misc_feature (964)..(964): n is a, c, g, or t
  misc_feature (975)..(976): n is a, c, g, or t
  misc_feature (978)..(978): n is a, c, g, or t
  misc_feature (980)..(982): n is a, c, g, or t
  misc_feature (985)..(985): n is a, c, g, or t
  misc_feature (990)..(991): n is a, c, g, or t
  misc_feature (995)..(995): n is a, c, g, or t
  misc_feature (997)..(998): n is a, c, g, or t
  misc_feature (1001)..(1001): n is a, c, g, or t
  misc_feature (1005)..(1005): n is a, c, g, or t
  misc_feature (1008)..(1009): n is a, c, g, or t
  misc_feature (1011)..(1011): n is a, c, g, or t
  misc_feature (1013)..(1013): n is a, c, g, or t
  misc_feature (1016)..(1019): n is a, c, g, or t
  misc_feature (1024)..(1024): n is a, c, g, or t
  misc_feature (1028)..(1028): n is a, c, g, or t
  misc_feature (1030)..(1031): n is a, c, g, or t
  misc_feature (1033)..(1033): n is a, c, g, or t
  misc_feature (1035)..(1035): n is a, c, g, or t
  misc_feature (1037)..(1037): n is a, c, g, or t
  misc_feature (1040)..(1041): n is a, c, g, or t
  misc_feature (1044)..(1044): n is a, c, g, or t
  misc_feature (1051)..(1051): n is a, c, g, or t
  misc_feature (1058)..(1060): n is a, c, g, or t
  misc_feature (1063)..(1063): n is a, c, g, or t
  misc_feature (1066)..(1067): n is a, c, g, or t
  misc_feature (1069)..(1069): n is a, c, g, or t
  misc_feature (1071)..(1071): n is a, c, g, or t
  misc_feature (1073)..(1073): n is a, c, g, or t
  misc_feature (1077)..(1078): n is a, c, g, or t
  misc_feature (1080)..(1080): n is a, c, g, or t
  misc_feature (1082)..(1082): n is a, c, g, or t
  misc_feature (1088)..(1090): n is a, c, g, or t
  misc_feature (1092)..(1092): n is a, c, g, or t
  misc_feature (1094)..(1095): n is a, c, g, or t
  misc_feature (1098)..(1099): n is a, c, g, or t
  misc_feature (1101)..(1101): n is a, c, g, or t
  misc_feature (1105)..(1105): n is a, c, g, or t
  misc_feature (1107)..(1108): n is a, c, g, or t
  misc_feature (1112)..(1113): n is a, c, g, or t
  misc_feature (1115)..(1117): n is a, c, g, or t
  misc_feature (1121)..(1121): n is a, c, g, or t
  misc_feature (1124)..(1124): n is a, c, g, or t
  misc_feature (1126)..(1127): n is a, c, g, or t
  misc_feature (1133)..(1133): n is a, c, g, or t
  misc_feature (1139)..(1142): n is a, c, g, or t
  misc_feature (1144)..(1148): n is a, c, g, or t
  misc_feature (1151)..(1151): n is a, c, g, or t
  misc_feature (1156)..(1156): n is a, c, g, or t
  misc_feature (1158)..(1159): n is a, c, g, or t
  misc_feature (1164)..(1165): n is a, c, g, or t
  misc_feature (1171)..(1172): n is a, c, g, or t
  misc_feature (1175)..(1175): n is a, c, g, or t
  misc_feature (1179)..(1179): n is a, c, g, or t
  misc_feature (1181)..(1181): n is a, c, g, or t
  misc_feature (1185)..(1185): n is a, c, g, or t
  misc_feature (1193)..(1197): n is a, c, g, or t
  misc_feature (1199)..(1199): n is a, c, g, or t
  misc_feature (1202)..(1202): n is a, c, g, or t
  misc_feature (1204)..(1206): n is a, c, g, or t
  misc_feature (1208)..(1209): n is a, c, g, or t
  misc_feature (1211)..(1211): n is a, c, g, or t
  misc_feature (1213)..(1216): n is a, c, g, or t
  misc_feature (1218)..(1218): n is a, c, g, or t
  misc_feature (1220)..(1221): n is a, c, g, or t
  misc_feature (1223)..(1223): n is a, c, g, or t
  misc_feature (1225)..(1225): n is a, c, g, or t
  misc_feature (1228)..(1228): n is a, c, g, or t
  misc_feature (1233)..(1233): n is a, c, g, or t
  misc_feature (1235)..(1235): n is a, c, g, or t
  misc_feature (1238)..(1239): n is a, c, g, or t
  misc_feature (1243)..(1243): n is a, c, g, or t
  misc_feature (1249)..(1250): n is a, c, g, or t
  misc_feature (1252)..(1253): n is a, c, g, or t
  misc_feature (1255)..(1255): n is a, c, g, or t
  misc_feature (1258)..(1258): n is a, c, g, or t
  misc_feature (1261)..(1261): n is a, c, g, or t
  misc_feature (1263)..(1265): n is a, c, g, or t
  misc_feature (1268)..(1268): n is a, c, g, or t
  misc_feature (1270)..(1272): n is a, c, g, or t
  misc_feature (1275)..(1275): n is a, c, g, or t
  misc_feature (1283)..(1283): n is a, c, g, or t
  misc_feature (1285)..(1285): n is a, c, g, or t
  misc_feature (1290)..(1290): n is a, c, g, or t
  misc_feature (1294)..(1294): n is a, c, g, or t
  misc_feature (1298)..(1298): n is a, c, g, or t
  misc_feature (1300)..(1300): n is a, c, g, or t
  misc_feature (1302)..(1302): n is a, c, g, or t
  misc_feature (1304)..(1305): n is a, c, g, or t
  misc_feature (1307)..(1308): n is a, c, g, or t
  misc_feature (1311)..(1311): n is a, c, g, or t
  misc_feature (1320)..(1322): n is a, c, g, or t
  misc_feature (1326)..(1327): n is a, c, g, or t
  misc_feature (1329)..(1329): n is a, c, g, or t
  misc_feature (1331)..(1331): n is a, c, g, or t
  misc_feature (1333)..(1334): n is a, c, g, or t
  misc_feature (1336)..(1338): n is a, c, g, or t
  misc_feature (1340)..(1340): n is a, c, g, or t
  misc_feature (1343)..(1343): n is a, c, g, or t
  misc_feature (1346)..(1346): n is a, c, g, or t
  misc_feature (1348)..(1349): n is a, c, g, or t
  misc_feature (1351)..(1351): n is a, c, g, or t
  misc_feature (1355)..(1355): n is a, c, g, or t
  misc_feature (1357)..(1357): n is a, c, g, or t
  misc_feature (1360)..(1361): n is a, c, g, or t
  misc_feature (1366)..(1366): n is a, c, g, or t
  misc_feature (1368)..(1370): n is a, c, g, or t
  misc_feature (1372)..(1375): n is a, c, g, or t
  misc_feature (1377)..(1378): n is a, c, g, or t
  misc_feature (1382)..(1384): n is a, c, g, or t
  misc_feature (1387)..(1387): n is a, c, g, or t
  misc_feature (1390)..(1390): n is a, c, g, or t
  misc_feature (1393)..(1393): n is a, c, g, or t
  misc_feature (1397)..(1398): n is a, c, g, or t
  misc_feature (1400)..(1400): n is a, c, g, or t
  misc_feature (1402)..(1403): n is a, c, g, or t
  misc_feature (1405)..(1405): n is a, c, g, or t
  misc_feature (1407)..(1407): n is a, c, g, or t
  misc_feature (1410)..(1410): n is a, c, g, or t
  misc_feature (1412)..(1412): n is a, c, g, or t
  misc_feature (1420)..(1421): n is a, c, g, or t
  misc_feature (1423)..(1423): n is a, c, g, or t
  misc_feature (1427)..(1427): n is a, c, g, or t
naatagagaaattactatgagaggatcgcatcaccattcaccatcacgggatcctatttaggtgacactatagaatcgtcgacccacgcgtccgtctacataaagattccacaggttccactgctgtgtcagctacaagggtgagaagaacagtgtggactggggtgaccttaacctggtgctgccctgtctggagtaccacaacaacacatggacatggctagactttgccatggctgtcaaaagggacagccgcaaagccctggttgcccaggtaatcaaagagaagctaaggctgaagtctgcaacaggctctgaggtccggggaaagctagaaactaaatcggacctgaacatgcaacagcaggaagaggaggagaaagcccggctcctcattggtttaagtgtgggcgacaagaaccctggcaagaagtccatctttggcaggcgcaaatgatttggcgattcgagtggctgcagtacaggatctgactctggctcaggctccagggacttgtggggtgggaggggcttcccgttatccacgaggatttgtgggtgtcagagcccataggcatcactcttcagcacctggtctgttcgctgcagggcatggtggacagtaatgctgagttctgtctcacactgatcaggctcagggccagagaggcaacaagagagcaagacccagggaatgggcccagggcaggaccctattcccttggggtcaagtgaaagggtagggggatagtcctgatcaagtgtgataaatttttatagacatatataaatatatatatattatatatataaaanaaaaaaanaaaaaaanaataannnncnccnatataanatanannnnnnanantcttncaananacnnnanaccncncctttantncnannnannnnnnnnnnnnntccnnnnnnaanngnnnncntnncnccnananancnacatnanttttcatcctnncntnnnttnctccnnctcnannaancccnccnnantntannnnctaanattntnncntncntcnncanctttttnttccccnnnatnctnntncntnatannanantaaaannnananntanncnaaancnntaannannnaaanaantnntaaaanacaaannnncnnnnnctnccccntnntaatnncccctnnttntttnanactnttctcaannnnntnttnannncnntnannnncnanncnanacntattnanacnnattnactacnntnnanccnacntnnncanannnaanattccctncnatttncatncccnancntnnannctncaaaaactnnnaaannanantnnannnantcntantnntntacncnttnnttaanannnannnnannccannnccntanttncatnnanannanantcnantatatatnntnactn

SEQ ID NO: 277 - DNA, 1389 bp, Homo Sapiens
  misc_feature (1)..(1): n is a, c, g, or t
  misc_feature (857)..(857): n is a, c, g, or t
  misc_feature (907)..(907): n is a, c, g, or t
  misc_feature (926)..(926): n is a, c, g, or t
  misc_feature (931)..(931): n is a, c, g, or t
  misc_feature (940)..(940): n is a, c, g, or t
  misc_feature (988)..(988): n is a, c, g, or t
  misc_feature (993)..(993): n is a, c, g, or t
  misc_feature (1004)..(1004): n is a, c, g, or t
  misc_feature (1015)..(1015): n is a, c, g, or t
  misc_feature (1025)..(1025): n is a, c, g, or t
  misc_feature (1028)..(1028): n is a, c, g, or t
  misc_feature (1036)..(1036): n is a, c, g, or t
  misc_feature (1052)..(1052): n is a, c, g, or t
  misc_feature (1068)..(1068): n is a, c, g, or t
  misc_feature (1074)..(1074): n is a, c, g, or t
  misc_feature (1076)..(1076): n is a, c, g, or t
  misc_feature (1082)..(1082): n is a, c, g, or t
  misc_feature (1086)..(1086): n is a, c, g, or t
  misc_feature (1089)..(1090): n is a, c, g, or t
  misc_feature (1093)..(1093): n is a, c, g, or t
  misc_feature (1101)..(1101): n is a, c, g, or t
  misc_feature (1107)..(1107): n is a, c, g, or t
  misc_feature (1116)..(1116): n is a, c, g, or t
  misc_feature (1118)..(1118): n is a, c, g, or t
  misc_feature (1120)..(1120): n is a, c, g, or t
  misc_feature (1126)..(1126): n is a, c, g, or t
  misc_feature (1139)..(1140): n is a, c, g, or t
  misc_feature (1143)..(1143): n is a, c, g, or t
  misc_feature (1146)..(1146): n is a, c, g, or t
  misc_feature (1150)..(1151): n is a, c, g, or t
  misc_feature (1153)..(1153): n is a, c, g, or t
  misc_feature (1155)..(1156): n is a, c, g, or t
  misc_feature (1164)..(1165): n is a, c, g, or t
  misc_feature (1170)..(1170): n is a, c, g, or t
  misc_feature (1175)..(1175): n is a, c, g, or t
  misc_feature (1178)..(1178): n is a, c, g, or t
  misc_feature (1183)..(1183): n is a, c, g, or t
  misc_feature (1206)..(1206): n is a, c, g, or t
  misc_feature (1221)..(1221): n is a, c, g, or t
  misc_feature (1226)..(1227): n is a, c, g, or t
  misc_feature (1234)..(1234): n is a, c, g, or t
  misc_feature (1237)..(1237): n is a, c, g, or t
  misc_feature (1239)..(1240): n is a, c, g, or t
  misc_feature (1243)..(1243): n is a, c, g, or t
  misc_feature (1250)..(1252): n is a, c, g, or t
  misc_feature (1260)..(1260): n is a, c, g, or t
  misc_feature (1263)..(1263): n is a, c, g, or t
  misc_feature (1268)..(1268): n is a, c, g, or t
  misc_feature (1270)..(1270): n is a, c, g, or t
  misc_feature (1273)..(1274): n is a, c, g, or t
  misc_feature (1284)..(1284): n is a, c, g, or t
  misc_feature (1290)..(1290): n is a, c, g, or t
  misc_feature (1294)..(1294): n is a, c, g, or t
  misc_feature (1317)..(1318): n is a, c, g, or t
  misc_feature (1320)..(1321): n is a, c, g, or t
  misc_feature (1324)..(1324): n is a, c, g, or t
  misc_feature (1330)..(1330): n is a, c, g, or t
  misc_feature (1332)..(1334): n is a, c, g, or t
  misc_feature (1343)..(1343): n is a, c, g, or t
  misc_feature (1348)..(1348): n is a, c, g, or t
  misc_feature (1358)..(1361): n is a, c, g, or t
  misc_feature (1363)..(1365): n is a, c, g, or t
  misc_feature (1369)..(1370): n is a, c, g, or t
  misc_feature (1374)..(1375): n is a, c, g, or t
  misc_feature (1382)..(1382): n is a, c, g, or t
  misc_feature (1384)..(1385): n is a, c, g, or t
  misc_feature (1387)..(1387): n is a, c, g, or t
  misc_feature (1389)..(1389): n is a, c, g, or t
ngagagattactatgagaggatcgcatcaccatcaccatcacggatcctatttaggtgacactatagaatcgtcgacccacgcgtccgcgcatccccagaaaagacgctacagcaagggcggcgcctgccggggcttgggggacgaccaccgccccgaggaccggggcttcggggtgcagagactgcggtccaaggcccagaacaaggagaacttcaggccggcctcctccgcggagcccgccgtgcagaaactggcgagcctgcggctgggcggggccgagccccggttgctgcgttgggacttgaccttctccccgccccagaaatccttgcctgtcgctctagagtccgacgaggagaatggggatgagctcaagtccagtacgggctcagcgcctatcctggtggtcatggtgatcttgctcaacatcggagtcgccattctgtttattaactttttcatctgatgagatgtcgcggtagcaaaaatagagaaagggtagaaaaaagggacattaaaattaaaagcaaaaccacaagaagggaaagaccgcaactcggacagcccagcgacttccaagtcctctcacagaagaaccacacgattgggtatcactcacagtttgcctttttttctgggtaatgttttttggattttagccaaaattctttgcttgtataacactctgctgtgtggcatggcagaaggaggccagcacgcagcccctccagctccacgtggagacagaagggatcccggcacatcagtggtaacagcggacgttgtcctcgtggtcacacgtcccgtcttgggtgtggatggagggcagcccggggcagaacctcagccccgcgnccctgagtggcagggctgactcccgtcgacacgagcttaaaaagtggatncactgctttctctgtctanaacanacgggtganaagtatgggccagaagcatggggcagggtggcccaccccagtgggcantaacntggcctttttntgtgtgaaatntgtgctgccnacntgaggganggggagggatcggccncctcctcctgtgaaanggatgnangtcttncctnttnnggnatgccccnggcttncatgaaaancnantccccncccgattttaaannaanccntttnntntnngcccctcnnggggnccatncgntgttncccccaaaccaggaacggggccntccatccctggtcantaaannaaacaanggntnnccngaaatgnnncccccggnctnggggncnttnntaagggaacngggttntttnccaaaaggccaaaaccttccggnntnnccngttttntnnnggggccccntcccnaaaaattttnnnncnnncccnngggnncaaaaanannantn

SEQ ID NO: 278 - DNA, 256 bp, Homo Sapiens
tagagaaattactatgagaggatcgcatcaccatcaccatcacggatcctatttaggtgacactatagaatcgtcgacccacgcgtccgcgcctgctgggcagggccggcgcggcccggccatggagtcctacgacatcatcgccaaccagcctgtggtcatcgacaacggttcgggggtgattaaagctggctttgcaggagaccagattcccaaatactgtttcccaaactatgtcgggcggccgaagcacatg

SEQ ID NO: 279 - DNA, 1216 bp, Homo Sapiens
  misc_feature (824)..(824): n is a, c, g, or t
  misc_feature (912)..(912): n is a, c, g, or t
  misc_feature (914)..(914): n is a, c, g, or t
  misc_feature (953)..(953): n is a, c, g, or t
  misc_feature (958)..(958): n is a, c, g, or t
  misc_feature (1010)..(1010): n is a, c, g, or t
  misc_feature (1017)..(1017): n is a, c, g, or t
  misc_feature (1019)..(1019): n is a, c, g, or t
  misc_feature (1021)..(1021): n is a, c, g, or t
  misc_feature (1029)..(1029): n is a, c, g, or t
  misc_feature (1033)..(1033): n is a, c, g, or t
  misc_feature (1075)..(1075): n is a, c, g, or t
  misc_feature (1078)..(1078): n is a, c, g, or t
  misc_feature (1085)..(1085): n is a, c, g, or t
  misc_feature (1087)..(1088): n is a, c, g, or t
  misc_feature (1090)..(1091): n is a, c, g, or t
  misc_feature (1098)..(1098): n is a, c, g, or t
  misc_feature (1100)..(1100): n is a, c, g, or t
  misc_feature (1109)..(1109): n is a, c, g, or t
  misc_feature (1144)..(1144): n is a, c, g, or t
  misc_feature (1146)..(1146): n is a, c, g, or t
  misc_feature (1148)..(1148): n is a, c, g, or t
  misc_feature (1153)..(1154): n is a, c, g, or t
  misc_feature (1160)..(1160): n is a, c, g, or t
  misc_feature (1171)..(1171): n is a, c, g, or t
  misc_feature (1178)..(1178): n is a, c, g, or t
  misc_feature (1186)..(1186): n is a, c, g, or t
  misc_feature (1192)..(1192): n is a, c, g, or t
  misc_feature (1195)..(1195): n is a, c, g, or t
  misc_feature (1204)..(1204): n is a, c, g, or t
  misc_feature (1209)..(1209): n is a, c, g, or t
  misc_feature (1216)..(1216): n is a, c, g, or t
taattagagaaattactatgagaggatcgcatcaccatcaccatcacggatcctatttaggtgacactatagaatcgtcgacccacgcgtccggcctggcaatggggaactctgagggctgcaataccaagaaggagggtgacctgatagctgctcaggctcggctgaaggacctggaggctctgctgaactccaaggaggccgcactgagcactgctctcagtgagaagcgcacgctggagggcgagctgcatgatctgcggggccaggtggccaagcttgaggcagccctaggtgaggccaagaagcaacttcaggatgagatgctgcggcgggtggatgctgagaacaggctgcagaccatgaaggaggaactggacttccagaagaacatctacagtgaggagctgcgtgagaccaagcgccgtcatgagacccgactggtggagattgacaatgggaagcagcgtgagtttgagagccggctggcggatgcgctgcaggaactgcgggcccagcatgaggaccaggtggagcagtataagaaggagctggagaagacttattctgccaagctggacaatgccaggcagtctgctgagaggaacagcaacctggtgggggctgcccacgaggagctgcagcagtcgcgcatccgcatcgacagcctctctgcccagctcagccagctccagaagcagctggcagccaaggaggcgaagcttcgagacctggaggactcactggcccgtgagcgggacaccagccggcggctgctggcggaaaaggagcgggagatggccgagatgcgggcaaggatgcancagcagctggacgagtaccaggagcttctggacatcaagctggccctggacatggagatccacgcctaccgcaagctcttggaaggcnangaagaaaggctacccctgtcccccagccctacctcgcancgcanccgtggccgtgcttcctctcctcatcccaaaaacagggtgggggcagcgtcnccaaaancncnaactggantccntgaaagcccaacagttttcaagcacgcacgcataacggcccntgncctgaananntnnaataaanangccaatttntccgctgcccacaatccatgagaacatcctggcantngnaatanncccaanggaaaatcctngttaatncggttccnaaattnccnaaggggggnggggnaaattgn

SEQ ID NO: 280 - DNA, 1232 bp, Homo Sapiens
  misc_feature (856)..(856): n is a, c, g, or t
  misc_feature (929)..(929): n is a, c, g, or t
  misc_feature (940)..(940): n is a, c, g, or t
  misc_feature (965)..(965): n is a, c, g, or t
  misc_feature (1008)..(1008): n is a, c, g, or t
  misc_feature (1017)..(1017): n is a, c, g, or t
  misc_feature (1019)..(1019): n is a, c, g, or t
  misc_feature (1027)..(1027): n is a, c, g, or t
  misc_feature (1031)..(1031): n is a, c, g, or t
  misc_feature (1036)..(1036): n is a, c, g, or t
  misc_feature (1049)..(1049): n is a, c, g, or t
  misc_feature (1051)..(1051): n is a, c, g, or t
  misc_feature (1053)..(1053): n is a, c, g, or t
  misc_feature (1071)..(1071): n is a, c, g, or t
  misc_feature (1086)..(1086): n is a, c, g, or t
  misc_feature (1096)..(1096): n is a, c, g, or t
  misc_feature (1099)..(1099): n is a, c, g, or t
  misc_feature (1105)..(1106): n is a, c, g, or t
  misc_feature (1121)..(1121): n is a, c, g, or t
  misc_feature (1124)..(1124): n is a, c, g, or t
  misc_feature (1126)..(1126): n is a, c, g, or t
  misc_feature (1128)..(1128): n is a, c, g, or t
  misc_feature (1135)..(1135): n is a, c, g, or t
  misc_feature (1138)..(1138): n is a, c, g, or t
  misc_feature (1147)..(1147): n is a, c, g, or t
  misc_feature (1157)..(1157): n is a, c, g, or t
  misc_feature (1168)..(1168): n is a, c, g, or t
  misc_feature (1172)..(1172): n is a, c, g, or t
  misc_feature (1176)..(1176): n is a, c, g, or t
  misc_feature (1178)..(1178): n is a, c, g, or t
  misc_feature (1188)..(1188): n is a, c, g, or t
  misc_feature (1190)..(1190): n is a, c, g, or t
  misc_feature (1192)..(1192): n is a, c, g, or t
  misc_feature (1199)..(1199): n is a, c, g, or t
  misc_feature (1203)..(1203): n is a, c, g, or t
  misc_feature (1205)..(1205): n is a, c, g, or t
  misc_feature (1207)..(1207): n is a, c, g, or t
  misc_feature (1211)..(1211): n is a, c, g, or t
  misc_feature (1221)..(1221): n is a, c, g, or t
  misc_feature (1228)..(1228): n is a, c, g, or t
agagaaattactatgagaggatcgcatcaccatcaccatcacggatcctatttaggtgacactatagaatcgtcgacccacgcgtccgggcaaataaccatggagaagactccaagttactttgtgacaaatgaggctcccaagcgcattcactccatggccaaggacatcaaactgattgtggtggtgagaaaccccgtgaccagggccatctctgactacacgcagacactgtcaaagaaacccgagatccccacctttgaggtgctggccttcaaaaaccggaccctcgggctgatcgatgcttcctggagtgccattcgaatagggatctatgcgctgcatctggaaaactggctccagtatttccccctctcccagatcctctttgtcagtggtgagcgactcattgtggaccccgccggggaaatggccaaagtacaggattttctaggcctcaaacgtgttgtgactgagaagcatttctatttcaacaaaaccaaggggttcccttgcctaaagaagccagaagacagcagtgccccgaggtgcttaggcaagagcaaaggtcggactcatcctcgcattgacccagatgtcatccacagactgaggaaattctacaaacccttcaacttgatgttttaccaaatgactggtcaagattttcagtgggaacaggaagagggtgataaatgaggctagagaggcagaggaaggctagtcaataagctaaggaggctccttgcctgagtccttgaataccccagcttctgcagcttcacttgctggagtgccaagtagatctcctcctccttcatgcagccaggaattgcctccagtgctgttagcttangcaaacaggtggatcccatggcatccccatggaggaaccaggcccatctgggcagcagcatctggttgaccanatggccaccanaaccccctgttcattcttatcttcngctagttaaatagcctgaagacaaggataaatagttgtcatgntcaaaaacngngctattantgtntatgngagcgacaaaaangntntgctttaaggggttctcnctctacctggggganaccagggttntanccctgnntttgtcaggggcccntgntntnaaaaccntgnttgggcttncccccaaaangccctttgggngganggcncnagaatcctangnanagggccncccncnangggntttcagcctnctttaanggcc

SEQ ID NO: 281 - DNA, 256 bp, Homo Sapiens
tcgggccgggctgcgtgagggaggagggttcatcatgcctagtggcgtataagaagaccccgccaccggtccctccacgcaccacttcaaagccgttcatctcagtcacagtccagagcagtactgagtctgcccaggacacctacctggacagccaggaccacaagagcgaggtgactagccagtcgggcctgagcaactcgtcggacagcctggacagcagtacccgaccgcccagcgtgacacggggtggagt

SEQ ID NO: 282 - DNA, 1710 bp, Homo Sapiens
  misc_feature (4)..(5): n is a, c, g, or t
  misc_feature (7)..(7): n is a, c, g, or t
  misc_feature (10)..(10): n is a, c, g, or t
  misc_feature (15)..(16): n is a, c, g, or t
  misc_feature (31)..(31): n is a, c, g, or t
  misc_feature (47)..(47): n is a, c, g, or t
  misc_feature (57)..(57): n is a, c, g, or t
  misc_feature (70)..(70): n is a, c, g, or t
  misc_feature (76)..(76): n is a, c, g, or t
  misc_feature (83)..(83): n is a, c, g, or t
  misc_feature (86)..(86): n is a, c, g, or t
  misc_feature (96)..(96): n is a, c, g, or t
  misc_feature (103)..(103): n is a, c, g, or t
  misc_feature (108)..(108): n is a, c, g, or t
  misc_feature (120)..(120): n is a, c, g, or t
  misc_feature (130)..(130): n is a, c, g, or t
  misc_feature (170)..(170): n is a, c, g, or t
  misc_feature (178)..(178): n is a, c, g, or t
  misc_feature (207)..(207): n is a, c, g, or t
  misc_feature (217)..(217): n is a, c, g, or t
  misc_feature (222)..(222): n is a, c, g, or t
  misc_feature (228)..(228): n is a, c, g, or t
  misc_feature (230)..(230): n is a, c, g, or t
  misc_feature (239)..(239): n is a, c, g, or t
  misc_feature (242)..(242): n is a, c, g, or t
  misc_feature (257)..(257): n is a, c, g, or t
  misc_feature (264)..(264): n is a, c, g, or t
  misc_feature (268)..(269): n is a, c, g, or t
  misc_feature (298)..(298): n is a, c, g, or t
  misc_feature (303)..(303): n is a, c, g, or t
  misc_feature (310)..(310): n is a, c, g, or t
  misc_feature (312)..(313): n is a, c, g, or t
  misc_feature (315)..(315): n is a, c, g, or t
  misc_feature (317)..(317): n is a, c, g, or t
  misc_feature (320)..(320): n is a, c, g, or t
  misc_feature (324)..(324): n is a, c, g, or t
  misc_feature (327)..(327): n is a, c, g, or t
  misc_feature (332)..(333): n is a, c, g, or t
  misc_feature (336)..(336): n is a, c, g, or t
  misc_feature (338)..(338): n is a, c, g, or t
  misc_feature (346)..(347): n is a, c, g, or t
  misc_feature (349)..(349): n is a, c, g, or t
  misc_feature (353)..(353): n is a, c, g, or t
  misc_feature (358)..(358): n is a, c, g, or t
  misc_feature (362)..(362): n is a, c, g, or t
  misc_feature (366)..(366): n is a, c, g, or t
  misc_feature (368)..(368): n is a, c, g, or t
  misc_feature (371)..(371): n is a, c, g, or t
  misc_feature (376)..(376): n is a, c, g, or t
  misc_feature (379)..(379): n is a, c, g, or t
  misc_feature (381)..(381): n is a, c, g, or t
  misc_feature (383)..(383): n is a, c, g, or t
  misc_feature (389)..(389): n is a, c, g, or t
  misc_feature (394)..(394): n is a, c, g, or t
  misc_feature (396)..(396): n is a, c, g, or t
  misc_feature (400)..(400): n is a, c, g, or t
  misc_feature (402)..(402): n is a, c, g, or t
  misc_feature (404)..(404): n is a, c, g, or t
  misc_feature (409)..(409): n is a, c, g, or t
  misc_feature (412)..(414): n is a, c, g, or t
  misc_feature (416)..(416): n is a, c, g, or t
  misc_feature (418)..(418): n is a, c, g, or t
  misc_feature (421)..(423): n is a, c, g, or t
  misc_feature (428)..(430): n is a, c, g, or t
  misc_feature (435)..(435): n is a, c, g, or t
  misc_feature (438)..(438): n is a, c, g, or t
  misc_feature (445)..(446): n is a, c, g, or t
  misc_feature (453)..(454): n is a, c, g, or t
  misc_feature (458)..(458): n is a, c, g, or t
  misc_feature (460)..(461): n is a, c, g, or t
  misc_feature (464)..(464): n is a, c, g, or t
  misc_feature (466)..(467): n is a, c, g, or t
  misc_feature (474)..(474): n is a, c, g, or t
  misc_feature (478)..(479): n is a, c, g, or t
  misc_feature (482)..(482): n is a, c, g, or t
  misc_feature (486)..(486): n is a, c, g, or t
  misc_feature (488)..(488): n is a, c, g, or t
  misc_feature (496)..(497): n is a, c, g, or t
  misc_feature (502)..(502): n is a, c, g, or t
  misc_feature (506)..(507): n is a, c, g, or t
  misc_feature (509)..(512): n is a, c, g, or t
  misc_feature (515)..(517): n is a, c, g, or t
  misc_feature (524)..(524): n is a, c, g, or t
  misc_feature (526)..(526): n is a, c, g, or t
  misc_feature (530)..(531): n is a, c, g, or t
  misc_feature (534)..(534): n is a, c, g, or t
  misc_feature (536)..(536): n is a, c, g, or t
  misc_feature (540)..(541): n is a, c, g, or t
  misc_feature (543)..(543): n is a, c, g, or t
  misc_feature (546)..(547): n is a, c, g, or t
  misc_feature (550)..(550): n is a, c, g, or t
  misc_feature (553)..(553): n is a, c, g, or t
  misc_feature (559)..(559): n is a, c, g, or t
  misc_feature (561)..(561): n is a, c, g, or t
  misc_feature (570)..(570): n is a, c, g, or t
  misc_feature (574)..(575): n is a, c, g, or t
  misc_feature (577)..(578): n is a, c, g, or t
  misc_feature (581)..(582): n is a, c, g, or t
  misc_feature (586)..(586): n is a, c, g, or t
  misc_feature (588)..(589): n is a, c, g, or t
  misc_feature (593)..(593): n is a, c, g, or t
  misc_feature (599)..(599): n is a, c, g, or t
  misc_feature (603)..(604): n is a, c, g, or t
  misc_feature (607)..(607): n is a, c, g, or t
  misc_feature (612)..(612): n is a, c, g, or t
  misc_feature (624)..(624): n is a, c, g, or t
  misc_feature (626)..(626): n is a, c, g, or t
  misc_feature (631)..(631): n is a, c, g, or t
  misc_feature (638)..(640): n is a, c, g, or t
  misc_feature (643)..(643): n is a, c, g, or t
  misc_feature (647)..(647): n is a, c, g, or t
  misc_feature (650)..(650): n is a, c, g, or t
  misc_feature (657)..(658): n is a, c, g, or t
  misc_feature (661)..(662): n is a, c, g, or t
  misc_feature (664)..(664): n is a, c, g, or t
  misc_feature (667)..(667): n is a, c, g, or t
  misc_feature (671)..(672): n is a, c, g, or t
  misc_feature (675)..(676): n is a, c, g, or t
  misc_feature (679)..(679): n is a, c, g, or t
  misc_feature (684)..(685): n is a, c, g, or t
  misc_feature (688)..(688): n is a, c, g, or t
  misc_feature (690)..(693): n is a, c, g, or t
  misc_feature (695)..(695): n is a, c, g, or t
  misc_feature (697)..(698): n is a, c, g, or t
  misc_feature (705)..(705): n is a, c, g, or t
  misc_feature (707)..(709): n is a, c, g, or t
  misc_feature (712)..(712): n is a, c, g, or t
  misc_feature (715)..(715): n is a, c, g, or t
  misc_feature (723)..(724): n is a, c, g, or t
  misc_feature (730)..(730): n is a, c, g, or t
  misc_feature (734)..(734): n is a, c, g, or t
  misc_feature (737)..(737): n is a, c, g, or t
  misc_feature (740)..(740): n is a, c, g, or t
  misc_feature (742)..(742): n is a, c, g, or t
  misc_feature (747)..(747): n is a, c, g, or t
  misc_feature (753)..(755): n is a, c, g, or t
  misc_feature (762)..(762): n is a, c, g, or t
  misc_feature (766)..(766): n is a, c, g, or t
  misc_feature (768)..(769): n is a, c, g, or t
  misc_feature (771)..(771): n is a, c, g, or t
  misc_feature (779)..(781): n is a, c, g, or t
  misc_feature (783)..(783): n is a, c, g, or t
  misc_feature (785)..(787): n is a, c, g, or t
  misc_feature (800)..(801): n is a, c, g, or t
  misc_feature (806)..(806): n is a, c, g, or t
  misc_feature (809)..(811): n is a, c, g, or t
  misc_feature (815)..(815): n is a, c, g, or t
  misc_feature (819)..(819): n is a, c, g, or t
  misc_feature (822)..(824): n is a, c, g, or t
  misc_feature (826)..(826): n is a, c, g, or t
  misc_feature (829)..(829): n is a, c, g, or t
  misc_feature (834)..(835): n is a, c, g, or t
  misc_feature (837)..(837): n is a, c, g, or t
  misc_feature (843)..(843): n is a, c, g, or t
  misc_feature (845)..(847): n is a, c, g, or t
  misc_feature (850)..(852): n is a, c, g, or t
  misc_feature (861)..(861): n is a, c, g, or t
  misc_feature (865)..(865): n is a, c, g, or t
  misc_feature (867)..(868): n is a, c, g, or t
  misc_feature (870)..(871): n is a, c, g, or t
  misc_feature (875)..(875): n is a, c, g, or t
  misc_feature (877)..(877): n is a, c, g, or t
  misc_feature (880)..(880): n is a, c, g, or t
  misc_feature (883)..(883): n is a, c, g, or t
  misc_feature (887)..(888): n is a, c, g, or t
  misc_feature (891)..(894): n is a, c, g, or t
  misc_feature (896)..(897): n is a, c, g, or t
  misc_feature (900)..(901): n is a, c, g, or t
  misc_feature (908)..(908): n is a, c, g, or t
  misc_feature (912)..(913): n is a, c, g, or t
  misc_feature (915)..(916): n is a, c, g, or t
  misc_feature (918)..(918): n is a, c, g, or t
  misc_feature (921)..(921): n is a, c, g, or t
  misc_feature (924)..(925): n is a, c, g, or t
  misc_feature (927)..(927): n is a, c, g, or t
  misc_feature (930)..(930): n is a, c, g, or t
  misc_feature (934)..(934): n is a, c, g, or t
  misc_feature (941)..(942): n is a, c, g, or t
  misc_feature (949)..(949): n is a, c, g, or t
  misc_feature (953)..(953): n is a, c, g, or t
  misc_feature (965)..(966): n is a, c, g, or t
  misc_feature (972)..(972): n is a, c, g, or t
  misc_feature (980)..(980): n is a, c, g, or t
  misc_feature (984)..(984): n is a, c, g, or t
  misc_feature (986)..(986): n is a, c, g, or t
  misc_feature (993)..(993): n is a, c, g, or t
  misc_feature (998)..(998): n is a, c, g, or t
  misc_feature (1002)..(1002): n is a, c, g, or t
  misc_feature (1005)..(1009): n is a, c, g, or t
  misc_feature (1011)..(1011): n is a, c, g, or t
  misc_feature (1013)..(1014): n is a, c, g, or t
  misc_feature (1016)..(1016): n is a, c, g, or t
  misc_feature (1021)..(1021): n is a, c, g, or t
  misc_feature (1023)..(1023): n is a, c, g, or t
  misc_feature (1027)..(1027): n is a, c, g, or t
  misc_feature (1031)..(1032): n is a, c, g, or t
  misc_feature (1039)..(1039): n is a, c, g, or t
  misc_feature (1044)..(1044): n is a, c, g, or t
  misc_feature (1049)..(1049): n is a, c, g, or t
  misc_feature (1055)..(1055): n is a, c, g, or t
  misc_feature (1057)..(1057): n is a, c, g, or t
  misc_feature (1064)..(1064): n is a, c, g, or t
  misc_feature (1070)..(1070): n is a, c, g, or t
  misc_feature (1073)..(1073): n is a, c, g, or t
  misc_feature (1078)..(1079): n is a, c, g, or t
  misc_feature (1082)..(1085): n is a, c, g, or t
  misc_feature (1089)..(1089): n is a, c, g, or t
  misc_feature (1091)..(1091): n is a, c, g, or t
  misc_feature (1093)..(1093): n is a, c, g, or t
  misc_feature (1096)..(1096): n is a, c, g, or t
  misc_feature (1100)..(1100): n is a, c, g, or t
  misc_feature (1104)..(1104): n is a, c, g, or t
  misc_feature (1108)..(1108): n is a, c, g, or t
  misc_feature (1110)..(1111): n is a, c, g, or t
  misc_feature (1117)..(1117): n is a, c, g, or t
  misc_feature (1120)..(1121): n is a, c, g, or t
  misc_feature (1123)..(1123): n is a, c, g, or t
  misc_feature (1125)..(1128): n is a, c, g, or t
  misc_feature (1134)..(1134): n is a, c, g, or t
  misc_feature (1136)..(1136): n is a, c, g, or t
  misc_feature (1139)..(1139): n is a, c, g, or t
  misc_feature (1144)..(1144): n is a, c, g, or t
  misc_feature (1146)..(1147): n is a, c, g, or t
  misc_feature (1151)..(1151): n is a, c, g, or t
  misc_feature (1154)..(1155): n is a, c, g, or t
  misc_feature (1157)..(1157): n is a, c, g, or t
  misc_feature (1163)..(1163): n is a, c, g, or t
  misc_feature (1169)..(1169): n is a, c, g, or t
  misc_feature (1171)..(1172): n is a, c, g, or t
  misc_feature (1175)..(1175): n is a, c, g, or t
  misc_feature (1177)..(1179): n is a, c, g, or t
  misc_feature (1182)..(1182): n is a, c, g, or t
  misc_feature (1185)..(1186): n is a, c, g, or t
  misc_feature (1188)..(1188): n is a, c, g, or t
  misc_feature (1190)..(1191): n is a, c, g, or t
  misc_feature (1198)..(1198): n is a, c, g, or t
  misc_feature (1202)..(1202): n is a, c, g, or t
  misc_feature (1204)..(1204): n is a, c, g, or t
  misc_feature (1206)..(1206): n is a, c, g, or t
  misc_feature (1211)..(1211): n is a, c, g, or t
  misc_feature (1214)..(1214): n is a, c, g, or t
  misc_feature (1218)..(1218): n is a, c, g, or t
  misc_feature (1220)..(1220): n is a, c, g, or t
  misc_feature (1223)..(1223): n is a, c, g, or t
  misc_feature (1225)..(1225): n is a, c, g, or t
  misc_feature (1227)..(1229): n is a, c, g, or t
  misc_feature (1232)..(1233): n is a, c, g, or t
  misc_feature (1235)..(1235): n is a, c, g, or t
  misc_feature (1242)..(1242): n is a, c, g, or t
  misc_feature (1253)..(1253): n is a, c, g, or t
  misc_feature (1259)..(1259): n is a, c, g, or t
  misc_feature (1267)..(1268): n is a, c, g, or t
  misc_feature (1274)..(1276): n is a, c, g, or t
  misc_feature (1278)..(1279): n is a, c, g, or t
  misc_feature (1285)..(1286): n is a, c, g, or t
  misc_feature (1289)..(1290): n is a, c, g, or t
  misc_feature (1301)..(1301): n is a, c, g, or t
  misc_feature (1307)..(1307): n is a, c, g, or t
  misc_feature (1310)..(1311): n is a, c, g, or t
  misc_feature (1313)..(1315): n is a, c, g, or t
  misc_feature (1319)..(1320): n is a, c, g, or t
  misc_feature (1322)..(1326): n is a, c, g, or t
  misc_feature (1331)..(1331): n is a, c, g, or t
  misc_feature (1333)..(1333): n is a, c, g, or t
  misc_feature (1337)..(1339): n is a, c, g, or t
  misc_feature (1342)..(1343): n is a, c, g, or t
  misc_feature (1346)..(1346): n is a, c, g, or t
  misc_feature (1352)..(1352): n is a, c, g, or t
  misc_feature (1362)..(1362): n is a, c, g, or t
  misc_feature (1375)..(1375): n is a, c, g, or t
  misc_feature (1379)..(1379): n is a, c, g, or t
  misc_feature (1383)..(1383): n is a, c, g, or t
  misc_feature (1387)..(1387): n is a, c, g, or t
  misc_feature (1394)..(1394): n is a, c, g, or t
  misc_feature (1396)..(1396): n is a, c, g, or t
  misc_feature (1400)..(1402): n is a, c, g, or t
  misc_feature (1404)..(1405): n is a, c, g, or t
  misc_feature (1414)..(1414): n is a, c, g, or t
  misc_feature (1417)..(1417): n is a, c, g, or t
  misc_feature (1420)..(1420): n is a, c, g, or t
  misc_feature (1422)..(1424): n is a, c, g, or t
  misc_feature (1426)..(1426): n is a, c, g, or t
  misc_feature (1429)..(1429): n is a, c, g, or t
  misc_feature (1432)..(1433): n is a, c, g, or t
  misc_feature (1435)..(1436): n is a, c, g, or t
  misc_feature (1443)..(1444): n is a, c, g, or t
  misc_feature (1446)..(1447): n is a, c, g, or t
  misc_feature (1452)..(1452): n is a, c, g, or t
  misc_feature (1455)..(1457): n is a, c, g, or t
  misc_feature (1460)..(1460): n is a, c, g, or t
  misc_feature (1462)..(1463): n is a, c, g, or t
  misc_feature (1468)..(1468): n is a, c, g, or t
  misc_feature (1472)..(1472): n is a, c, g, or t
  misc_feature (1478)..(1479): n is a, c, g, or t
  misc_feature (1484)..(1484): n is a, c, g, or t
  misc_feature (1486)..(1489): n is a, c, g, or t
  misc_feature (1492)..(1492): n is a, c, g, or t
  misc_feature (1502)..(1502): n is a, c, g, or t
  misc_feature (1510)..(1510): n is a, c, g, or t
  misc_feature (1517)..(1517): n is a, c, g, or t
  misc_feature (1527)..(1527): n is a, c, g, or t
  misc_feature (1530)..(1530): n is a, c, g, or t
  misc_feature (1533)..(1534): n is a, c, g, or t
  misc_feature (1537)..(1537): n is a, c, g, or t
  misc_feature (1541)..(1543): n is a, c, g, or t
  misc_feature (1545)..(1548): n is a, c, g, or t
  misc_feature (1552)..(1552): n is a, c, g, or t
  misc_feature (1555)..(1555): n is a, c, g, or t
  misc_feature (1557)..(1557): n is a, c, g, or t
  misc_feature (1562)..(1562): n is a, c, g, or t
  misc_feature (1566)..(1566): n is a, c, g, or t
  misc_feature (1574)..(1574): n is a, c, g, or t
  misc_feature (1578)..(1578): n is a, c, g, or t
  misc_feature (1584)..(1584): n is a, c, g, or t
  misc_feature (1586)..(1586): n is a, c, g, or t
  misc_feature (1590)..(1591): n is a, c, g, or t
  misc_feature (1596)..(1596): n is a, c, g, or t
  misc_feature (1599)..(1599): n is a, c, g, or t
  misc_feature (1602)..(1602): n is a, c, g, or t
  misc_feature (1605)..(1606): n is a, c, g, or t
  misc_feature (1611)..(1611): n is a, c, g, or t
  misc_feature (1613)..(1613): n is a, c, g, or t
  misc_feature (1616)..(1617): n is a, c, g, or t
  misc_feature (1626)..(1629): n is a, c, g, or t
  misc_feature (1634)..(1634): n is a, c, g, or t
  misc_feature (1636)..(1636): n is a, c, g, or t
  misc_feature (1639)..(1639): n is a, c, g, or t
  misc_feature (1641)..(1641): n is a, c, g, or t
  misc_feature (1654)..(1654): n is a, c, g, or t
  misc_feature (1660)..(1660): n is a, c, g, or t
  misc_feature (1669)..(1669): n is a, c, g, or t
  misc_feature (1673)..(1673): n is a, c, g, or t
  misc_feature (1684)..(1686): n is a, c, g, or t
  misc_feature (1689)..(1690): n is a, c, g, or t
  misc_feature (1693)..(1693): n is a, c, g, or t
  misc_feature (1695)..(1696): n is a, c, g, or t
  misc_feature (1700)..(1700): n is a, c, g, or t
  misc_feature (1702)..(1702): n is a, c, g, or t
  misc_feature (1706)..(1706): n is a, c, g, or t
  misc_feature (1709)..(1710): n is a, c, g, or t
ccannanagnaaatnntttgggggggtcgcntccccctcccccctcncgggatcctnttttggtgagacnataganatcgttnganccacgcgttncgtgcanacgancggaggctgggnagcgtcgcancgcatgcttcggtgctggaacccacccggcaggcgcaggncacccacncccggtctctgagcggctgccccccgcancattgcacgngcgancctcgncngcccactgncancggccgcgggactgnctgggantggnncggccgagggcactgctcctcggtgcatngctgntcgggcncnntngnccnaagnaanccagnnttnancggtcgtnngncacntccgnggancctnantgnacatnatnancnactgtntgtanancagngntnatatncannnantntcnnnaacgnnnatagnganaatcaannagtccannttcnanngancnnttctctntaannaanaggnanctacggtnnatcanctgnncnnnnacnnnacaacananaccnnatncnatanncnaannttnggnactgcntnataaatatntcgnnannagnnatcnanntcanaaaatncttnnaantgatnagaaataacacntntgtanataaatnnnganaaantanaatatannccnngnaanaaanntanntanaaacnntanannnncngnnatacctntnnnagnagnaaaatttnncccaanactncantcnanataancctaannntccctcncctncnnanagaatagnnnanannnattggtacttagnntaaanttnnnaacnaaanctnnntnttncaatnnanccatgnannnccnnnattaatttnatgncnntnncaantnaanttntcannagnnnnannctnntaaaaanaaannanntnacntcnncntanaatnatggtcnntaccttnggtncaaagaaatctnnactctntccctttngaanangaaactntttcnctcnagnnnnntntnnancacantnacanccanngcctccntcacngaaancaccangncaatctntaacanagnaatanntcnnnnaatngntngantctnatcncttnanntgtctnctnncngnnnnctaatnangantcaangnnattnagnnanatgcantatcgncnnttntnnnatnttnncnannttccaanaacntntnttctncantacntnaantngnnnccnncnccaaacnacaagcctcgnatagtnatttctannatttannncnntcattnnacnntttaaattctnatattnctnntnnnattnntnnnnncctanancctnnnatnnatnttattncctacctctnttctcacattaantaanatanactnctaagcnanaaannncnnaattctatncanatntnnngnctnttnntnntttgtcnnannaaatncannntcntnntgtancgtngtatannctaantnnnnatnataatcaagnatctcacntcatttntcttttgtantanttnntcnactnnnannnnaatngantntatanattnttctcatnttanttcatnantagnnccttnatngancannaacantncgnngtctacaannnntttantntcngnaaatatatctgtnctgaantactatcanccantcttccaacannnaannatnannatantnattnttnn

SEQ ID NO: 283 - DNA, 256 bp, Homo Sapiens
  misc_feature (5)..(8): n is a, c, g, or t
  misc_feature (10)..(10): n is a, c, g, or t
  misc_feature (12)..(17): n is a, c, g, or t
  misc_feature (20)..(23): n is a, c, g, or t
  misc_feature (25)..(25): n is a, c, g, or t
  misc_feature (27)..(27): n is a, c, g, or t
  misc_feature (34)..(34): n is a, c, g, or t
  misc_feature (36)..(36): n is a, c, g, or t
  misc_feature (56)..(56): n is a, c, g, or t
  misc_feature (70)..(70): n is a, c, g, or t
  misc_feature (226)..(226): n is a, c, g, or t
  misc_feature (228)..(228): n is a, c, g, or t
  misc_feature (238)..(238): n is a, c, g, or t
  misc_feature (251)..(251): n is a, c, g, or t
agggnnnngncnnnnnnggnnnncncncctcccncnaccttaaagaggagaattanctatgagaggatcncatcaccatcaccatcacggatcctatttaggtgacactatagaatctgtcgacccacgcgtccggcgggagcggagtagcggaccccagagagcactgcgcagccccaccgccgccgccggcctagttaccatcacaccccgggaggagccaacncnatgccgcagncgaacccagccancatca

SEQ ID NO: 284 - DNA, 256 bp, Homo Sapiens
  misc_feature (7)..(7): n is a, c, g, or t
tcttaangaggagaattaactatgagaggatcgcatcaccatcaccatcacggatcctatttaggtgacactatagaatcgtcgacccacgcgtccgccatggagggtgtagaagagaagaagaaggaggttcctgctgtgccagaaacccttaagaaaaagcgaaggaatttcgcagagctgaagatcaagcgcctgagaaagaagtttgcccaaaagatgcttcgaaaggcaaggaggaagcttatctatgaaa

SEQ ID NO: 285 - DNA, 1200 bp, Homo Sapiens
  misc_feature (906)..(906): n is a, c, g, or t
  misc_feature (941)..(941): n is a, c, g, or t
  misc_feature (952)..(952): n is a, c, g, or t
  misc_feature (976)..(976): n is a, c, g, or t
  misc_feature (984)..(984): n is a, c, g, or t
  misc_feature (993)..(993): n is a, c, g, or t
  misc_feature (1004)..(1004): n is a, c, g, or t
  misc_feature (1011)..(1011): n is a, c, g, or t
  misc_feature (1014)..(1014): n is a, c, g, or t
  misc_feature (1024)..(1025): n is a, c, g, or t
  misc_feature (1033)..(1033): n is a, c, g, or t
  misc_feature (1037)..(1038): n is a, c, g, or t
  misc_feature (1047)..(1047): n is a, c, g, or t
  misc_feature (1049)..(1049): n is a, c, g, or t
  misc_feature (1055)..(1055): n is a, c, g, or t
  misc_feature (1062)..(1062): n is a, c, g, or t
  misc_feature (1066)..(1066): n is a, c, g, or t
  misc_feature (1068)..(1068): n is a, c, g, or t
  misc_feature (1075)..(1075): n is a, c, g, or t
  misc_feature (1082)..(1082): n is a, c, g, or t
  misc_feature (1087)..(1087): n is a, c, g, or t
  misc_feature (1090)..(1090): n is a, c, g, or t
  misc_feature (1095)..(1095): n is a, c, g, or t
  misc_feature (1127)..(1127): n is a, c, g, or t
  misc_feature (1132)..(1132): n is a, c, g, or t
  misc_feature (1134)..(1134): n is a, c, g, or t
  misc_feature (1137)..(1137): n is a, c, g, or t
  misc_feature (1160)..(1160): n is a, c, g, or t
  misc_feature (1169)..(1169): n is a, c, g, or t
  misc_feature (1199)..(1200): n is a, c, g, or t
tagagaaattactatgagaggatcgcatcaccatcaccatcacggatcctatttaggtgacactatagaatcgtcgacccacgcgtccgaaaagcatgataaagaaaaggaacaaaaggatcccaaaaagcttcgttcctttaaagtatctagcatagattcttcagaacagaaaaaaaccaagaaaaacttaaagaagtttcttacacgacgccccactttgcaagctgttcgtgaaaaaggttatattaaagatcaggtatttggatccaatctcgctaatctgtgtcagagagagaatggcacagtaccaaagtttgtgaagttatgtattgaacatgttgaagaacatggtttggatattgatgggatatacagagtaagtggcaacctcgcagtgatccagaaactaaggtttgcagtcaatcatgatgagaaattggacttgaatgacagtaaatgggaagatattcatgtcattactggagccctcaaaatgttttttcgagaattaccagaacctctttttacatttaatcattttaatgattttgttaatgcaattaagcaagaaccaagacagcgagtcgctgctgttaaggacctaatcagacagttgccaaagccaaaccaagacacaatgcagattcttttccgacatctcagaagagttatagaaaatggagagaaaaatcgaatgacctatcagagtatagcaattgtttttggtcccactctattaaaaccagaaaaagagactggtaatatagcagttcatactgtgtaccagaatcagattgtagaattaattcttctggaactgagttccatcttcggacgttgattcttactgaagacaacctgtggaatagaagctggattccatcagattccaatgtttatacncatgtattttattttttggaccaagcagtgactcnttgattttgcncttttttttttgagggatcaaaanggaagggnaaagtccanatgtgtgttangcccccnaanttgccgcttnnttgcaagntgannaaccggcgngnaattangaatccntttnanccggaangttggcnttccnacncgganttccgaaaatccaaacttaaaattctacccgncctananccngggaaaattgggaaaaaaacggnatttttttncccggaaatggaaaagggactttcctcccnn

SEQ ID NO: 286 - DNA, 1196 bp, Homo Sapiens
  misc_feature (836)..(836): n is a, c, g, or t
  misc_feature (880)..(880): n is a, c, g, or t
  misc_feature (894)..(894): n is a, c, g, or t
  misc_feature (900)..(900): n is a, c, g, or t
  misc_feature (907)..(907): n is a, c, g, or t
  misc_feature (956)..(956): n is a, c, g, or t
  misc_feature (1014)..(1014): n is a, c, g, or t
  misc_feature (1021)..(1021): n is a, c, g, or t
  misc_feature (1028)..(1028): n is a, c, g, or t
  misc_feature (1041)..(1041): n is a, c, g, or t
  misc_feature (1049)..(1049): n is a, c, g, or t
  misc_feature (1059)..(1059): n is a, c, g, or t
  misc_feature (1068)..(1068): n is a, c, g, or t
  misc_feature (1077)..(1077): n is a, c, g, or t
  misc_feature (1083)..(1083): n is a, c, g, or t
  misc_feature (1093)..(1093): n is a, c, g, or t
  misc_feature (1098)..(1098): n is a, c, g, or t
  misc_feature (1107)..(1107): n is a, c, g, or t
  misc_feature (1118)..(1118): n is a, c, g, or t
  misc_feature (1120)..(1120): n is a, c, g, or t
  misc_feature (1123)..(1123): n is a, c, g, or t
  misc_feature (1131)..(1131): n is a, c, g, or t
  misc_feature (1143)..(1143): n is a, c, g, or t
  misc_feature (1156)..(1156): n is a, c, g, or t
  misc_feature (1169)..(1169): n is a, c, g, or t
  misc_feature (1173)..(1173): n is a, c, g, or t
  misc_feature (1177)..(1177): n is a, c, g, or t
  misc_feature (1184)..(1184): n is a, c, g, or t
  misc_feature (1188)..(1188): n is a, c, g, or t
agagaaattactatgagaggatcgcatcaccatcaccatcacggatcctatttaggtgacactatagaatcgtcgacccacgcgtccggggacggcggccgggagggcgcggcccgggttcccgttccccgcggagccatgcggtacaacgagaaggagctgcaggctctgtcccggcagccggccgagatggcggccgagctgggcatgaggggccccaagaagggcagcgacgaggccgagcccgtcggagccctgctgctggagcgctgcagagtcgtccgggaagagcccggcaccttctccatcagcttcattgaggaccctgagaggaagtatcactttgagtgcagcagcgaggagcagtgtcaggagtggatggaggctctgcgtcgggccagctacgagttcatgcggagaagcctcatcttctacaggaacgaaatccggaaggtgacgggcaaggaccccctggaacagttcggcatatccgaggaggccaggttccagctgagtggcttgcaggcgtgagcgcagggcacggtggtcagcgtgcagcgggacgggactggccctgcccagccatgaatcgcttggccatgcctggatctgttttgttttggtttttggtttttgggtcagggtttcactgtgttgcccaggctagagtgcagtggtgccacagctcactgtgaccttgaccttctggactcaagtgatcctcctgcctcagcttcccaagtagcggggatcacaggcatgagccgccacacccggccatcacacctggattttcagtgggaggtttttggtttggagacatccaaagcctgaanccaggtgggtgtgggcaggggctgcattttatgaaactgcccancaagctgcgctccntggggnccccagnatccacctaactggcctggcacctggtgccacgtgctgctgccgccagnatatgcgccttcccacaggtgccctgcctgaattgtgtgcatccaggggcctggtgancccccanggctggnggcatggcccccntgccccgngctgaatgantgtacaaanccaaaaaancttttnaatggcctanggctnaatcccccnccacctttaantnttntgcaaaangaaggcccttgnttttcccttgggnaaatgttttcctngggnccangggtttntttntttaaaaa

SEQ ID NO: 287 - DNA, 256 bp, Homo Sapiens
  misc_feature (4)..(4): n is a, c, g, or t
ttanctatgagaggatcgcatcaccatcaccatcacggatcctatttaggtgacactatagaatcgtcgacccacgcgtccgagaggatgtacactcgcctggagcccctgctcatgcagctggactacagcatgaaggcagaagccaatgccctgcatcacaaacacgacaagaggaagcgtcaggggaagaatgcacccccaggaggtgatgagccactggcagagacagagagtgaaagcgaggcaaagctgg

SEQ ID NO: 288 - DNA, 1200 bp, Homo Sapiens
  misc_feature (760)..(760): n is a, c, g, or t
  misc_feature (825)..(825): n is a, c, g, or t
  misc_feature (892)..(892): n is a, c, g, or t
  misc_feature (906)..(906): n is a, c, g, or t
  misc_feature (950)..(950): n is a, c, g, or t
  misc_feature (963)..(963): n is a, c, g, or t
  misc_feature (975)..(975): n is a, c, g, or t
  misc_feature (977)..(977): n is a, c, g, or t
  misc_feature (979)..(979): n is a, c, g, or t
  misc_feature (983)..(984): n is a, c, g, or t
  misc_feature (1004)..(1004): n is a, c, g, or t
  misc_feature (1024)..(1024): n is a, c, g, or t
  misc_feature (1039)..(1039): n is a, c, g, or t
  misc_feature (1043)..(1043): n is a, c, g, or t
  misc_feature (1062)..(1062): n is a, c, g, or t
  misc_feature (1067)..(1067): n is a, c, g, or t
  misc_feature (1073)..(1073): n is a, c, g, or t
  misc_feature (1088)..(1088): n is a, c, g, or t
  misc_feature (1091)..(1091): n is a, c, g, or t
  misc_feature (1094)..(1094): n is a, c, g, or t
  misc_feature (1098)..(1102): n is a, c, g, or t
  misc_feature (1104)..(1104): n is a, c, g, or t
  misc_feature (1106)..(1114): n is a, c, g, or t
  misc_feature (1116)..(1116): n is a, c, g, or t
  misc_feature (1119)..(1125): n is a, c, g, or t
  misc_feature (1128)..(1129): n is a, c, g, or t
  misc_feature (1131)..(1137): n is a, c, g, or t
  misc_feature (1139)..(1141): n is a, c, g, or t
  misc_feature (1143)..(1143): n is a, c, g, or t
  misc_feature (1146)..(1147): n is a, c, g, or t
  misc_feature (1149)..(1154): n is a, c, g, or t
  misc_feature (1161)..(1162): n is a, c, g, or t
  misc_feature (1171)..(1171): n is a, c, g, or t
  misc_feature (1186)..(1186): n is a, c, g, or t
  misc_feature (1195)..(1196): n is a, c, g, or t
aatagagaaattactatgagaggatcgcatcaccatcaccatcacggatcctatttaggtgacactatagaatcgtcgacccacgcgtccggacagaaaaatggtttcctaggctgctgctattctgtgcagtgtcagaacatgttcgcctgtgtcccagtgacttcagcttcagctgtggctgaaagaggccaaggcacagctcagacccttgcttctaagggtgtaaaccctaagccttgcagtttcccacatggtgtttggcctgttggtgcatagaagtcaaaaatcgaggtttgagaacctccacctagatttcggaggatgtatggaaatgcctggatatccaggcagaattttgctggagaggcagagccctaacagagaacctctgctaaggcagtgcagaagggaaatgttgggtcagaactcccacacagagtccccactggggcactgcctagtggagcagtgagaagagggccaccatcctccagaccccagaatggtagatccaccaacagcttgcactatgcatctggaaaagctgcagacagtcaacaccatcctatgaaagcagtggaaagtggggctatatcttgcaaagccacagaggcggggctgcccaaggccatgggtgcccatctcttgcatcagcatgacctggatgtgtgacatgaagtcaagggagatcattttggagctttaagatctggctgccctgctgaattttggacttgcatgaggcctgtagccctgnttgttttggccaatttctcccaattggaatgggtatattttttctattgcctgtaccccccattngtatctaggaaagtaactaacttgctttttgattttacagtctcgtaggtagaaagaaactgctttntctcaaatgagacntttggactgtgggactttttgagttaacccttgaaaataaggcntttgggagactgntaaaaaaaggcntnanctgnnggtttgaaattgtgaggacnttgaaaatttgggaagtggntggaatggaaacatngaanctaacctttttaaaaaatnggaantcctancaaaaaaaaaaaaanaanaanaaannnnntntnnnnnnnnnantcnnnnnnnaanntnnnnnnnannnanttnnannnnnntgggggnngccccccanaaggggccaaaaaancttattacnnaact

SEQ ID NO: 289 - DNA, 1398 bp, Homo Sapiens
  misc_feature (1)..(1): n is a, c, g, or t
  misc_feature (897)..(897): n is a, c, g, or t
  misc_feature (942)..(942): n is a, c, g, or t
  misc_feature (944)..(944): n is a, c, g, or t
  misc_feature (950)..(950): n is a, c, g, or t
  misc_feature (964)..(964): n is a, c, g, or t
  misc_feature (971)..(971): n is a, c, g, or t
  misc_feature (973)..(973): n is a, c, g, or t
  misc_feature (1006)..(1006): n is a, c, g, or t
  misc_feature (1011)..(1011): n is a, c, g, or t
  misc_feature (1017)..(1017): n is a, c, g, or t
  misc_feature (1023)..(1023): n is a, c, g, or t
  misc_feature (1025)..(1025): n is a, c, g, or t
  misc_feature (1037)..(1037): n is a, c, g, or t
  misc_feature (1050)..(1050): n is a, c, g, or t
  misc_feature (1052)..(1052): n is a, c, g, or t
  misc_feature (1055)..(1055): n is a, c, g, or t
  misc_feature (1061)..(1062): n is a, c, g, or t
  misc_feature (1072)..(1072): n is a, c, g, or t
  misc_feature (1077)..(1077): n is a, c, g, or t
  misc_feature (1083)..(1083): n is a, c, g, or t
  misc_feature (1086)..(1086): n is a, c, g, or t
  misc_feature (1095)..(1095): n is a, c, g, or t
  misc_feature (1119)..(1119): n is a, c, g, or t
  misc_feature (1125)..(1125): n is a, c, g, or t
  misc_feature (1143)..(1143): n is a, c, g, or t
  misc_feature (1145)..(1145): n is a, c, g, or t
  misc_feature (1151)..(1151): n is a, c, g, or t
  misc_feature (1157)..(1157): n is a, c, g, or t
  misc_feature (1160)..(1160): n is a, c, g, or t
  misc_feature (1167)..(1167): n is a, c, g, or t
  misc_feature (1175)..(1175): n is a, c, g, or t
  misc_feature (1215)..(1215): n is a, c, g, or t
  misc_feature (1217)..(1218): n is a, c, g, or t
  misc_feature (1224)..(1224): n is a, c, g, or t
  misc_feature (1231)..(1231): n is a, c, g, or t
  misc_feature (1245)..(1245): n is a, c, g, or t
  misc_feature (1255)..(1255): n is a, c, g, or t
  misc_feature (1258)..(1258): n is a, c, g, or t
  misc_feature (1260)..(1261): n is a, c, g, or t
  misc_feature (1264)..(1264): n is a, c, g, or t
  misc_feature (1281)..(1282): n is a, c, g, or t
  misc_feature (1286)..(1286): n is a, c, g, or t
  misc_feature (1300)..(1300): n is a, c, g, or t
  misc_feature (1303)..(1303): n is a, c, g, or t
  misc_feature (1310)..(1310): n is a, c, g, or t
  misc_feature (1315)..(1315): n is a, c, g, or t
  misc_feature (1320)..(1320): n is a, c, g, or t
  misc_feature (1345)..(1345): n is a, c, g, or t
  misc_feature (1350)..(1350): n is a, c, g, or t
  misc_feature (1353)..(1353): n is a, c, g, or t
  misc_feature (1357)..(1357): n is a, c, g, or t
  misc_feature (1372)..(1372): n is a, c, g, or t
  misc_feature (1388)..(1389): n is a, c, g, or t
  misc_feature (1391)..(1398): n is a, c, g, or t
naatagagaaattactatgagaggatcgcatcaccatcaccatcacggatcctatttaggtgacactatagaatcgtcgacccacgcgtccgcaggtagaaaactggtgtcatcagctgtttctcccagcatcatacctcaagaggatccttcccagcagttcctgcagcagagccttgaaagagtgtatagtcttcagcacttggaccctcagggagcccaggagctgctggaattcaccatcagggatctgcaaagacttggagaacttcaatctgaattggcaggagtagctgatttctctgccacctatcttcgctgtcaactacttctcatcaaggccttgcagaaaagttgtggaatgtagctgcccctttgtatttgaagcagagtgatttggcctcagcagcagcgaaacagattatggaagagacctacaaaatggaattcatgtacagtggtgtggagaataagcaggtggtgattatacatcacatgaggctgcaggccaaagctttgcaacttatagtaacagcacgaactacacgaggacttgaccccttatttgggatgtgtgaaaaatttttacaggaagtagacttttttcagaggtatttcatcgctgatttgccccacttgcaggacagctttgtggacaaactccttgaccttatgccccgactcatgacatccaaacctgcagaagtggtcaaaattctacagaccatgctgcgacagagtgcctttctgcatctcccgcttccagagcagatccacaaagcctcagccaccatcatcgagccagcgggcgagtcagacaaccctttgcggtttacctctgggttggtggttgccctggatgttgatgcaaccctggagcatgtgcaggatcctcanaacactgttaaggtccaggtctaatatccagatggccaggctcanangattcnccccaagcctgcanacttccngnaatcctggcccagggcggcaccggctcatcacncaggnttatcnctcccncnccgcttggacanaggcctgccaggngnaantgaagnntgctgctggncctanactccnggnccccattcnaaaaggcccctgaagggagggggngaaagntccccccgggggaaaccncnatcggnggcccnttnccttcanaagccggnaaaatttaataatgcccaacctgcccgggctaggaaaaananncttccnaccgggncaaaaggccccttnagggccaaangancnnccngaacccctccccgaatnngggnagcttaagaatggnccntcccccntcggnaaaancgaaaatttttctttaaaaaaaaancttanttntccntccccgccaaagggnaaaccccaaaaaaaannannnnnnnn

SEQ ID NO: 290 - DNA, 1200 bp, Homo Sapiens
  misc_feature (819)..(819): n is a, c, g, or t
  misc_feature (870)..(870): n is a, c, g, or t
  misc_feature (872)..(872): n is a, c, g, or t
  misc_feature (910)..(910): n is a, c, g, or t
  misc_feature (913)..(914): n is a, c, g, or t
  misc_feature (929)..(929): n is a, c, g, or t
  misc_feature (953)..(953): n is a, c, g, or t
  misc_feature (959)..(960): n is a, c, g, or t
  misc_feature (962)..(962): n is a, c, g, or t
  misc_feature (972)..(972): n is a, c, g, or t
  misc_feature (979)..(979): n is a, c, g, or t
  misc_feature (983)..(983): n is a, c, g, or t
  misc_feature (995)..(995): n is a, c, g, or t
  misc_feature (1004)..(1005): n is a, c, g, or t
  misc_feature (1010)..(1010): n is a, c, g, or t
  misc_feature (1018)..(1018): n is a, c, g, or t
  misc_feature (1025)..(1025): n is a, c, g, or t
  misc_feature (1038)..(1038): n is a, c, g, or t
  misc_feature (1047)..(1047): n is a, c, g, or t
  misc_feature (1060)..(1060): n is a, c, g, or t
  misc_feature (1075)..(1075): n is a, c, g, or t
  misc_feature (1080)..(1082): n is a, c, g, or t
  misc_feature (1088)..(1089): n is a, c, g, or t
  misc_feature (1101)..(1101): n is a, c, g, or t
  misc_feature (1112)..(1112): n is a, c, g, or t
  misc_feature (1117)..(1117): n is a, c, g, or t
  misc_feature (1127)..(1127): n is a, c, g, or t
  misc_feature (1137)..(1137): n is a, c, g, or t
  misc_feature (1139)..(1139): n is a, c, g, or t
  misc_feature (1141)..(1141): n is a, c, g, or t
  misc_feature (1148)..(1148): n is a, c, g, or t
  misc_feature (1152)..(1152): n is a, c, g, or t
  misc_feature (1156)..(1156): n is a, c, g, or t
  misc_feature (1159)..(1159): n is a, c, g, or t
  misc_feature (1166)..(1166): n is a, c, g, or t
  misc_feature (1169)..(1169): n is a, c, g, or t
  misc_feature (1173)..(1173): n is a, c, g, or t
  misc_feature (1176)..(1176): n is a, c, g, or t
  misc_feature (1185)..(1185): n is a, c, g, or t
  misc_feature (1190)..(1191): n is a, c, g, or t
  misc_feature (1198)..(1199): n is a, c, g, or t
tagagaaattactatgagaggatcgcatcaccatcaccatcacggatcctatttaggtgacactatagaatcgtcgacccacgcgtccggccagctccaccagcacgtgcagcagctacacctgggcacccggctgcctgtggtggtcgtggccaacaaagctgacctgttgcacatcaaacaggttgaccctcagcttggactgcagctagccagcatgctaggctgctcattctatgaagtgtctgtcagtgaaaattataatgatgtctacagcgccttccacgtcctctgtaaagaggtcagtcacaaacagcagcctagcagtacacccgagaagcgaagaacctccctcattcccaggcccaagtcacccaacatgcaggacctgaagaggaggtttaagcaagccctctctgccaaagtgaggactgtcacctccgtctgaagcaggaggagcactcaagggggtttggtcttcccaggaagagggcctgaggttctcctagtgcaggaacgttgaatattggcaatgattcctggttccagaaagggctggagcagaagggccaagagggcctgtggaactgctacagaaaaggaagtgttgttctgagcagggggacaggattgatgaggcttgaaagagcccactgagccactctctgaatatgtgaaatgtactctgtgtcttttcctttagagtggggagggggcataatcgtttcggtttctgcattcaactaccttgtaaatggtggtccgttgcagtttcaccaaatgtattgatgtgatttacagtgggaatgaaagaaacanataaggcattgataggctttccttttttcccccctttttttccttttttcncntttcctcctttccttttccccccttttttcccccaaanaannaaaaattggcttttnccccttaaccaaaaatgaatttgntaaacnntngaaacacctnattcttnaaanaatggccctttntaaaacctnnaaagnaaaccccnaaatttntttttttttttgnaaaaaaaangaaaaatcccccntaccccccaaaaaanaggtnnnattttnngggccccaaaantatttttttanacccnaaaaattggnaaactcctcngngnttaaaanaaancctntgnttccccnccnccanganataaaaaantcccnnttggcgnng

SEQ ID NO: 291 - DNA, 1200 bp, Homo Sapiens
  misc_feature (742)..(742): n is a, c, g, or t
  misc_feature (759)..(759): n is a, c, g, or t
  misc_feature (813)..(813): n is a, c, g, or t
  misc_feature (833)..(833): n is a, c, g, or t
  misc_feature (840)..(841): n is a, c, g, or t
  misc_feature (853)..(853): n is a, c, g, or t
  misc_feature (859)..(859): n is a, c, g, or t
  misc_feature (861)..(861): n is a, c, g, or t
  misc_feature (891)..(891): n is a, c, g, or t
  misc_feature (907)..(908): n is a, c, g, or t
  misc_feature (910)..(910): n is a, c, g, or t
  misc_feature (914)..(914): n is a, c, g, or t
  misc_feature (936)..(936): n is a, c, g, or t
  misc_feature (941)..(943): n is a, c, g, or t
  misc_feature (951)..(951): n is a, c, g, or t
  misc_feature (962)..(962): n is a, c, g, or t
  misc_feature (971)..(971): n is a, c, g, or t
  misc_feature (974)..(974): n is a, c, g, or t
  misc_feature (983)..(984): n is a, c, g, or t
  misc_feature (992)..(992): n is a, c, g, or t
  misc_feature (994)..(994): n is a, c, g, or t
  misc_feature (1006)..(1006): n is a, c, g, or t
  misc_feature (1009)..(1009): n is a, c, g, or t
  misc_feature (1020)..(1020): n is a, c, g, or t
  misc_feature (1027)..(1027): n is a, c, g, or t
  misc_feature (1036)..(1036): n is a, c, g, or t
  misc_feature (1073)..(1074): n is a, c, g, or t
  misc_feature (1091)..(1091): n is a, c, g, or t
  misc_feature (1100)..(1100): n is a, c, g, or t
  misc_feature (1107)..(1107): n is a, c, g, or t
  misc_feature (1114)..(1114): n is a, c, g, or t
  misc_feature (1121)..(1121): n is a, c, g, or t
  misc_feature (1132)..(1132): n is a, c, g, or t
  misc_feature (1134)..(1134): n is a, c, g, or t
  misc_feature (1136)..(1136): n is a, c, g, or t
  misc_feature (1138)..(1138): n is a, c, g, or t
  misc_feature (1140)..(1140): n is a, c, g, or t
  misc_feature (1147)..(1148): n is a, c, g, or t
  misc_feature (1155)..(1155): n is a, c, g, or t
  misc_feature (1163)..(1163): n is a, c, g, or t
  misc_feature (1173)..(1173): n is a, c, g, or t
  misc_feature (1175)..(1175): n is a, c, g, or t
  misc_feature (1177)..(1177): n is a, c, g, or t
  misc_feature (1179)..(1179): n is a, c, g, or t
  misc_feature (1186)..(1186): n is a, c, g, or t
  misc_feature (1190)..(1190): n is a, c, g, or t
  misc_feature (1195)..(1196): n is a, c, g, or t
aatagagaaaattaactatgagaggatcgcatcaccatcaccatcacggatcctatttaggtgacactatagaatcgtcgacccacgcgtccgcccacgcgtccgcaccagcatcctgcacaacctctcccaccaccgggaggggctgctcgccatcttcaagtcgggtggcatccctgctctggtccgcatgctcagctcccctgtggagtcggtcctgttctatgccatcaccacgctgcacaacctgctcctgtaccaggagggcgccaagatggccgtgcgcctggccgacgggctgcaaaagatggtgcccctgctcaacaagaacaaccccaagttcctggccatcaccaccgactgcctgcagctcctggcctacggcaaccaggagagcaagctgatcatcctggccaatggtgggccccaggccctcgtgcagatcatgcgtaactacagttatgaaaagctgctctggaccaccagtcgtgtgctcaaggtgctatccgtgtgtcccagcaataagcctgccattgtggaggctggtgggatgcaggccctgggcaagcacctgaccagcaacagcccccgcctggtgcagaactgcctgtggaccctgcgcaacctctcagatgtggccaccaagcaggagggcctggagagtgtgctgaagattctggtgaatcagctgagtgtggatgacgtcaacgtcctcacctgtgccacgggcacactctccaanctgacatgcaacaacancaagaacaagacgctggtgacacagaacagcggtgtggaggctctcatccatgnccatcctgcgtgctggtganaaggaannaaaatcacgganccttgncntctgcgcttttgcgccacctcaataaccgnccaaccctgaaggccnnanaatnggcccaaaaactctgtgcgttntcaannnatgggcantccaacccatncttgaaaantgnttcaaccanncccaaccnantgggccatttgnttnaaggcaaaccntttgggnttgattaanaaaattgggccttggggccaaaccaaacattgccccnnttaagaaagaaacggtnattcccccncctctgnccaaatnggtgggntgaaaggcccncnananancccaacnnctccatnttttattnaaaaaaaacncntnanagaaagntttnaaaannaaaa

SEQ ID NO: 292 - DNA, 1423 bp, Homo Sapiens
  misc_feature (587)..(587): n is a, c, g, or t
  misc_feature (614)..(614): n is a, c, g, or t
  misc_feature (661)..(661): n is a, c, g, or t
  misc_feature (701)..(701): n is a, c, g, or t
  misc_feature (730)..(730): n is a, c, g, or t
  misc_feature (740)..(740): n is a, c, g, or t
  misc_feature (743)..(743): n is a, c, g, or t
  misc_feature (751)..(751): n is a, c, g, or t
  misc_feature (754)..(754): n is a, c, g, or t
  misc_feature (757)..(757): n is a, c, g, or t
  misc_feature (759)..(759): n is a, c, g, or t
  misc_feature (762)..(762): n is a, c, g, or t
  misc_feature (783)..(783): n is a, c, g, or t
  misc_feature (791)..(791): n is a, c, g, or t
  misc_feature (825)..(825): n is a, c, g, or t
  misc_feature (829)..(830): n is a, c, g, or t
  misc_feature (835)..(835): n is a, c, g, or t
  misc_feature (838)..(838): n is a, c, g, or t
  misc_feature (841)..(841): n is a, c, g, or t
  misc_feature (848)..(848): n is a, c, g, or t
  misc_feature (850)..(850): n is a, c, g, or t
  misc_feature (856)..(856): n is a, c, g, or t
  misc_feature (862)..(862): n is a, c, g, or t
  misc_feature (869)..(869): n is a, c, g, or t
  misc_feature (873)..(873): n is a, c, g, or t
  misc_feature (878)..(879): n is a, c, g, or t
  misc_feature (886)..(888): n is a, c, g, or t
  misc_feature (893)..(893): n is a, c, g, or t
  misc_feature (897)..(897): n is a, c, g, or t
  misc_feature (899)..(901): n is a, c, g, or t
  misc_feature (904)..(904): n is a, c, g, or t
  misc_feature (907)..(907): n is a, c, g, or t
  misc_feature (913)..(913): n is a, c, g, or t
  misc_feature (916)..(916): n is a, c, g, or t
  misc_feature (918)..(918): n is a, c, g, or t
  misc_feature (927)..(927): n is a, c, g, or t
  misc_feature (931)..(931): n is a, c, g, or t
  misc_feature (934)..(934): n is a, c, g, or t
  misc_feature (937)..(937): n is a, c, g, or t
  misc_feature (947)..(947): n is a, c, g, or t
  misc_feature (949)..(949): n is a, c, g, or t
  misc_feature (960)..(960): n is a, c, g, or t
  misc_feature (967)..(967): n is a, c, g, or t
  misc_feature (974)..(974): n is a, c, g, or t
  misc_feature (977)..(977): n is a, c, g, or t
  misc_feature (984)..(985): n is a, c, g, or t
  misc_feature (993)..(993): n is a, c, g, or t
  misc_feature (999)..(999): n is a, c, g, or t
  misc_feature (1002)..(1002): n is a, c, g, or t
  misc_feature (1004)..(1004): n is a, c, g, or t
  misc_feature (1007)..(1007): n is a, c, g, or t
  misc_feature (1009)..(1011): n is a, c, g, or t
  misc_feature (1017)..(1017): n is a, c, g, or t
  misc_feature (1029)..(1029): n is a, c, g, or t
  misc_feature (1032)..(1032): n is a, c, g, or t
  misc_feature (1035)..(1035): n is a, c, g, or t
  misc_feature (1039)..(1039): n is a, c, g, or t
  misc_feature (1047)..(1047): n is a, c, g, or t
  misc_feature (1051)..(1051): n is a, c, g, or t
  misc_feature (1057)..(1057): n is a, c, g, or t
  misc_feature (1070)..(1070): n is a, c, g, or t
  misc_feature (1077)..(1077): n is a, c, g, or t
  misc_feature (1082)..(1083): n is a, c, g, or t
  misc_feature (1085)..(1085): n is a, c, g, or t
  misc_feature (1087)..(1087): n is a, c, g, or t
  misc_feature (1091)..(1091): n is a, c, g, or t
  misc_feature (1097)..(1097): n is a, c, g, or t
  misc_feature (1105)..(1105): n is a, c, g, or t
  misc_feature (1114)..(1114): n is a, c, g, or t
  misc_feature (1117)..(1117): n is a, c, g, or t
  misc_feature (1121)..(1121): n is a, c, g, or t
  misc_feature (1125)..(1125): n is a, c, g, or t
  misc_feature (1127)..(1127): n is a, c, g, or t
  misc_feature (1136)..(1136): n is a, c, g, or t
  misc_feature (1138)..(1139): n is a, c, g, or t
  misc_feature (1141)..(1142): n is a, c, g, or t
  misc_feature (1145)..(1145): n is a, c, g, or t
  misc_feature (1148)..(1148): n is a, c, g, or t
  misc_feature (1150)..(1150): n is a, c, g, or t
  misc_feature (1156)..(1157): n is a, c, g, or t
  misc_feature (1162)..(1162): n is a, c, g, or t
  misc_feature (1168)..(1168): n is a, c, g, or t
  misc_feature (1170)..(1171): n is a, c, g, or t
  misc_feature (1173)..(1173): n is a, c, g, or t
  misc_feature (1181)..(1181): n is a, c, g, or t
  misc_feature (1184)..(1184): n is a, c, g, or t
  misc_feature (1188)..(1188): n is a, c, g, or t
  misc_feature (1194)..(1195): n is a, c, g, or t
  misc_feature (1198)..(1199): n is a, c, g, or t
  misc_feature (1210)..(1210): n is a, c, g, or t
  misc_feature (1216)..(1216): n is a, c, g, or t
  misc_feature (1220)..(1220): n is a, c, g, or t
  misc_feature (1223)..(1226): n is a, c, g, or t
  misc_feature (1237)..(1238): n is a, c, g, or t
  misc_feature (1242)..(1242): n is a, c, g, or t
  misc_feature (1247)..(1247): n is a, c, g, or t
  misc_feature (1249)..(1251): n is a, c, g, or t
  misc_feature (1257)..(1258): n is a, c, g, or t
  misc_feature (1262)..(1262): n is a, c, g, or t
  misc_feature (1271)..(1271): n is a, c, g, or t
  misc_feature (1286)..(1288): n is a, c, g, or t
  misc_feature (1294)..(1294): n is a, c, g, or t
  misc_feature (1298)..(1299): n is a, c, g, or t
  misc_feature (1305)..(1305): n is a, c, g, or t
  misc_feature (1307)..(1308): n is a, c, g, or t
  misc_feature (1310)..(1310): n is a, c, g, or t
  misc_feature (1312)..(1312): n is a, c, g, or t
  misc_feature (1318)..(1318): n is a, c, g, or t
  misc_feature (1321)..(1321): n is a, c, g, or t
  misc_feature (1325)..(1325): n is a, c, g, or t
  misc_feature (1330)..(1330): n is a, c, g, or t
  misc_feature (1334)..(1334): n is a, c, g, or t
  misc_feature (1340)..(1340): n is a, c, g, or t
  misc_feature (1351)..(1351): n is a, c, g, or t
  misc_feature (1355)..(1358): n is a, c, g, or t
  misc_feature (1365)..(1365): n is a, c, g, or t
  misc_feature (1367)..(1367): n is a, c, g, or t
  misc_feature (1369)..(1369): n is a, c, g, or t
  misc_feature (1371)..(1371): n is a, c, g, or t
  misc_feature (1373)..(1375): n is a, c, g, or t
  misc_feature (1377)..(1378): n is a, c, g, or t
  misc_feature (1383)..(1384): n is a, c, g, or t
  misc_feature (1388)..(1388): n is a, c, g, or t
  misc_feature (1393)..(1393): n is a, c, g, or t
  misc_feature (1397)..(1398): n is a, c, g, or t
  misc_feature (1403)..(1404): n is a, c, g, or t
  misc_feature (1406)..(1406): n is a, c, g, or t
  misc_feature (1409)..(1409): n is a, c, g, or t
  misc_feature (1411)..(1414): n is a, c, g, or t
  misc_feature (1417)..(1417): n is a, c, g, or t
  misc_feature (1419)..(1419): n is a, c, g, or t
  misc_feature (1421)..(1421): n is a, c, g, or t
tagagaaattactatgagaggatcgcatcaccatcaccatcacggatcctatttaggtgacactatagaatcgtcgacccacgcgtccgcctcgacaacctatcgaaggcgccatggagcgaccggcgcccctggccgtgcttcccttctcggaccccgcgcacgccctgagcctgctgcgcggcctgagccagctgcgcgccgagcgcaagttcctggacgtgaccctggaggcggcgggcgggcgcgacttcccggcgcaccgtgcggtgctggccgccgccagcccctacttccgcgccatgttcgcggggcagctgcgcgagagccgcgccgagcgggtgcgcctgcacggagtgcctcccgacatgctgcagctgctgctggacttcagctacacgggccgcgtggcggtaagcggcgacaacgctgagccgctgctgcgcgccgccgacctgctgcagttcccggccgtgaaggaggcgtgcggggccttcctgcagcagcagctcgacctggccaactgcctggacatgcaggacttcgctgaggccttcagctgctcgggactggcgagcgcggcgcancggttcattctgcgccacgtgggcganctgggcgccgagcagctggagcggctgccactggcgcgcctgctgcnctacctgcgggacgacgggctgtgtgtgcccaaggaggangccgcctaccagctggcgctgcgctgggnccgcgctganccnccgcgccncgncgngncanttgggccgcaactgctggaangccgtgcncctgcccttcgttgcgcccgcttctacctgatgncgcnnattcnagnccnaacccgntngtggangcgctncccaccntggnctgcnnctgctgnnncgaangaancnnnaanttncaggcnggnangttaaaacnccanaancancgggtccctntncccaaaaaganttctttncccgttnacnggtattnnccaaaaantccttntgntnttngnnngttttncaaccaaaaatnttnaancaanttgttcantatncaaatnttaaaacccccanaaaaggnataanngngnatancttgancaaatttnccaaaaaanctngtgngaantnaacaaattntnngnntgntananaaattnnaatanagagtngnncnaaagatcncgntttnaaaaanngtnnaaagaaaaaanaacctntaanttnnnntaaatatcccnnattnaaaancnnnaaaacnncatnctctttttnaaaatatatatagtnnntcaccnaaanntaattnannananatattnttngaanacctnaaanaaaaancaaaaaatttnactnnnnttgggantntntnannntnnctttnntaanaaatnatannatatnnanaanannnnttntnantt

SEQ ID NO: 293 - DNA, 256 bp, Homo Sapiens
  misc_feature (2)..(4): n is a, c, g, or t
  misc_feature (8)..(10): n is a, c, g, or t
tnnnaggnnnaattaactatgagaggatcgcatcaccatcaccatcacggatcctatttaggtgacactatagaatcgtcgacccacgcgtccgcccacgcgtccgctgacgcttacaagatcacccccggcgctcgaggagccttctccgaggagtacaagcggctcgatgaggacctggctgcctactgccgccgccgggacatcagaattcttgtgcttgatgacaccaaccacgaacgggaacggctggagc

SEQ ID NO: 294 - DNA, 256 bp, Homo Sapiens
  misc_feature (3)..(4): n is a, c, g, or t
ttnnctatgagaggatcgcatcaccatcaccatcacggatcctatttaggtgacactatagaatcgtcgacccacgcgtccgggccgcgcgggtggctgagcagcggcctggtgcgctcgcttagcgggcgacggaatcagacggacgtggacgcccccggagtggaagccgaagcaggagttgttgttgctgaggggctgccgcagccgccgcgagcctccggacagacgccagagcgaggagggcgctacgcga

SEQ ID NO: 295 - DNA, 1235 bp, Homo Sapiens
  misc_feature (936)..(936): n is a, c, g, or t
  misc_feature (1005)..(1005): n is a, c, g, or t
  misc_feature (1041)..(1041): n is a, c, g, or t
  misc_feature (1068)..(1068): n is a, c, g, or t
  misc_feature (1082)..(1082): n is a, c, g, or t
  misc_feature (1098)..(1098): n is a, c, g, or t
  misc_feature (1103)..(1103): n is a, c, g, or t
  misc_feature (1112)..(1112): n is a, c, g, or t
  misc_feature (1120)..(1120): n is a, c, g, or t
  misc_feature (1125)..(1125): n is a, c, g, or t
  misc_feature (1131)..(1132): n is a, c, g, or t
  misc_feature (1137)..(1138): n is a, c, g, or t
  misc_feature (1149)..(1149): n is a, c, g, or t
  misc_feature (1156)..(1156): n is a, c, g, or t
  misc_feature (1165)..(1165): n is a, c, g, or t
  misc_feature (1171)..(1171): n is a, c, g, or t
  misc_feature (1176)..(1176): n is a, c, g, or t
  misc_feature (1180)..(1180): n is a, c, g, or t
  misc_feature (1184)..(1184): n is a, c, g, or t
  misc_feature (1189)..(1190): n is a, c, g, or t
  misc_feature (1198)..(1199): n is a, c, g, or t
  misc_feature (1209)..(1209): n is a, c, g, or t
  misc_feature (1222)..(1222): n is a, c, g, or t
  misc_feature (1226)..(1226): n is a, c, g, or t
  misc_feature (1228)..(1230): n is a, c, g, or t
tagagaaattactatgagaggatcgcatcaccatcaccatcacggatcctatttaggtgacactatagaatcgtcgacccacgcgtccgcgccgcccaagatgccgaaaggaaagaaggccaagggaaagaaggtggctccggccccagctgtcgtgaagaagcaggaggctaagaaagtggtgaatcccctgtttgagaaaaggcctaagaattttggcattggacaggacatccagcccaaaagagacctcacccgctttgtgaaatggccccgctatatcaggttgcagcggcagagagccatcctctataagcggctgaaagtgcctcctgcgattaaccagttcacccaggccctggaccgccaaacagctactcagctgcttaagctggcccacaagtacagaccagagacaaagcaagagaagaagcagagactgttggcccgggccgagaagaaggctgctggcaaaggggacgtcccaacgaagagaccacctgtccttcgagcaggagttaacaccgtcaccaccttggtggagaacaagaaagctcagctggtggtgattgcacacgacgtggatcccatcgagctggttgtcttcttgcctgccctgtgtcgtaaaatgggggtcccttactgcattatcaagggaaaggcaagactgggacgtctagtccacaggaagacctgcaccactgtcgccttcacacaggtgaactcggaagacaaaggcgctttggctaagctggtggaagctatcaggaccaattacaatgacagatacgatgagatccgccgtcactggggtggcaatgtcctgggtcctaagtctgtggctcgtatcgccaagctcgaaaaggcaaaggctaaagaacttgccactaaactgggttaaatgtacactgttgagttttctgtacataaaaatanttgaaataatacaaattttccttcaaaaaaaaaaaaaaggggggccgccgcaaccatgaccgtggagtncgaggaggcgtcaaggactccccgcgcttcagggcnacattgacaaagtggaaacggacttgntggaaattgagccnaactggaaacctggtnaactntgcatggcntggggaancggtnagcctnntcacnncacaggttttntgagggntcccgactntccaanatgcngggnaccnttttnngaattttnnaagttcttancctagaaggggantccntnnnctttg

SEQ ID NO: 296 - DNA, 256 bp, Homo Sapiens
  misc_feature (2)..(29): n is a, c, g, or t
  misc_feature (31)..(31): n is a, c, g, or t
  misc_feature (33)..(37): n is a, c, g, or t
  misc_feature (39)..(40): n is a, c, g, or t
  misc_feature (44)..(47): n is a, c, g, or t
  misc_feature (49)..(49): n is a, c, g, or t
  misc_feature (51)..(54): n is a, c, g, or t
  misc_feature (63)..(64): n is a, c, g, or t
  misc_feature (69)..(69): n is a, c, g, or t
  misc_feature (77)..(77): n is a, c, g, or t
  misc_feature (79)..(79): n is a, c, g, or t
  misc_feature (86)..(86): n is a, c, g, or t
  misc_feature (88)..(91): n is a, c, g, or t
  misc_feature (97)..(97): n is a, c, g, or t
  misc_feature (100)..(100): n is a, c, g, or t
  misc_feature (103)..(103): n is a, c, g, or t
  misc_feature (105)..(106): n is a, c, g, or t
  misc_feature (110)..(110): n is a, c, g, or t
  misc_feature (113)..(113): n is a, c, g, or t
  misc_feature (116)..(117): n is a, c, g, or t
  misc_feature (120)..(124): n is a, c, g, or t
  misc_feature (128)..(129): n is a, c, g, or t
  misc_feature (134)..(134): n is a, c, g, or t
  misc_feature (138)..(138): n is a, c, g, or t
  misc_feature (146)..(148): n is a, c, g, or t
  misc_feature (150)..(150): n is a, c, g, or t
  misc_feature (155)..(159): n is a, c, g, or t
  misc_feature (161)..(164): n is a, c, g, or t
  misc_feature (169)..(169): n is a, c, g, or t
  misc_feature (173)..(174): n is a, c, g, or t
  misc_feature (183)..(183): n is a, c, g, or t
  misc_feature (187)..(187): n is a, c, g, or t
  misc_feature (189)..(189): n is a, c, g, or t
  misc_feature (193)..(193): n is a, c, g, or t
  misc_feature (201)..(201): n is a, c, g, or t
  misc_feature (205)..(206): n is a, c, g, or t
  misc_feature (214)..(214): n is a, c, g, or t
  misc_feature (216)..(216): n is a, c, g, or t
  misc_feature (218)..(218): n is a, c, g, or t
  misc_feature (225)..(225): n is a, c, g, or t
  misc_feature (231)..(231): n is a, c, g, or t
  misc_feature (235)..(237): n is a, c, g, or t
  misc_feature (239)..(239): n is a, c, g, or t
  misc_feature (241)..(242): n is a, c, g, or t
  misc_feature (247)..(248): n is a, c, g, or t
  misc_feature (251)..(251): n is a, c, g, or t
  misc_feature (254)..(255): n is a, c, g, or t
gnnnnnnnnnnnnnnnnnnnnnnnnnnnnangnnnnngnngagnnnnangnnnnaggaaagtnnatgancgtaaaantnataaggntnnnntaggtnttnttntnnagtngtnccnnctnnnnntctnnccacntatncttaatgnnntnatcannnnngnnnngcccnacgnnataggaatngtgntngtgncggggctncggnngtgagatngnanatcagtnttagcngagnnnancnngcaanngcngcnng

SEQ ID NO: 297 - DNA, 1380 bp, Homo Sapiens
  misc_feature (2)..(2): n is a, c, g, or t
  misc_feature (801)..(801): n is a, c, g, or t
  misc_feature (807)..(807): n is a, c, g, or t
  misc_feature (818)..(818): n is a, c, g, or t
  misc_feature (826)..(826): n is a, c, g, or t
  misc_feature (851)..(852): n is a, c, g, or t
  misc_feature (868)..(868): n is a, c, g, or t
  misc_feature (872)..(872): n is a, c, g, or t
  misc_feature (886)..(886): n is a, c, g, or t
  misc_feature (896)..(896): n is a, c, g, or t
  misc_feature (899)..(899): n is a, c, g, or t
  misc_feature (903)..(903): n is a, c, g, or t
  misc_feature (905)..(905): n is a, c, g, or t
  misc_feature (923)..(923): n is a, c, g, or t
  misc_feature (927)..(927): n is a, c, g, or t
  misc_feature (938)..(939): n is a, c, g, or t
  misc_feature (954)..(954): n is a, c, g, or t
  misc_feature (968)..(968): n is a, c, g, or t
  misc_feature (974)..(974): n is a, c, g, or t
  misc_feature (978)..(978): n is a, c, g, or t
  misc_feature (982)..(984): n is a, c, g, or t
  misc_feature (986)..(986): n is a, c, g, or t
  misc_feature (991)..(992): n is a, c, g, or t
  misc_feature (995)..(995): n is a, c, g, or t
  misc_feature (1001)..(1001): n is a, c, g, or t
  misc_feature (1006)..(1006): n is a, c, g, or t
  misc_feature (1017)..(1017): n is a, c, g, or t
  misc_feature (1026)..(1026): n is a, c, g, or t
  misc_feature (1034)..(1034): n is a, c, g, or t
  misc_feature (1036)..(1036): n is a, c, g, or t
  misc_feature (1044)..(1044): n is a, c, g, or t
  misc_feature (1047)..(1048): n is a, c, g, or t
  misc_feature (1058)..(1058): n is a, c, g, or t
  misc_feature (1067)..(1067): n is a, c, g, or t
  misc_feature (1070)..(1070): n is a, c, g, or t
  misc_feature (1073)..(1073): n is a, c, g, or t
  misc_feature (1077)..(1077): n is a, c, g, or t
  misc_feature (1079)..(1080): n is a, c, g, or t
  misc_feature (1083)..(1083): n is a, c, g, or t
  misc_feature (1091)..(1091): n is a, c, g, or t
  misc_feature (1093)..(1093): n is a, c, g, or t
  misc_feature (1110)..(1110): n is a, c, g, or t
  misc_feature (1113)..(1113): n is a, c, g, or t
  misc_feature (1116)..(1116): n is a, c, g, or t
  misc_feature (1129)..(1129): n is a, c, g, or t
  misc_feature (1132)..(1136): n is a, c, g, or t
  misc_feature (1142)..(1142): n is a, c, g, or t
  misc_feature (1145)..(1146): n is a, c, g, or t
  misc_feature (1148)..(1148): n is a, c, g, or t
  misc_feature (1150)..(1151): n is a, c, g, or t
  misc_feature (1153)..(1154): n is a, c, g, or t
  misc_feature (1175)..(1175): n is a, c, g, or t
  misc_feature (1179)..(1180): n is a, c, g, or t
  misc_feature (1182)..(1182): n is a, c, g, or t
  misc_feature (1184)..(1184): n is a, c, g, or t
  misc_feature (1186)..(1186): n is a, c, g, or t
  misc_feature (1189)..(1191): n is a, c, g, or t
  misc_feature (1194)..(1195): n is a, c, g, or t
  misc_feature (1198)..(1198): n is a, c, g, or t
  misc_feature (1200)..(1202): n is a, c, g, or t
  misc_feature (1210)..(1210): n is a, c, g, or t
  misc_feature (1215)..(1215): n is a, c, g, or t
  misc_feature (1217)..(1217): n is a, c, g, or t
  misc_feature (1221)..(1222): n is a, c, g, or t
  misc_feature (1225)..(1225): n is a, c, g, or t
  misc_feature (1227)..(1227): n is a, c, g, or t
  misc_feature (1231)..(1232): n is a, c, g, or t
  misc_feature (1252)..(1252): n is a, c, g, or t
  misc_feature (1257)..(1257): n is a, c, g, or t
  misc_feature (1264)..(1264): n is a, c, g, or t
  misc_feature (1267)..(1270): n is a, c, g, or t
  misc_feature (1272)..(1273): n is a, c, g, or t
  misc_feature (1276)..(1278): n is a, c, g, or t
  misc_feature (1280)..(1288): n is a, c, g, or t
  misc_feature (1291)..(1296): n is a, c, g, or t
  misc_feature (1299)..(1301): n is a, c, g, or t
  misc_feature (1304)..(1313): n is a, c, g, or t
  misc_feature (1315)..(1315): n is a, c, g, or t
  misc_feature (1329)..(1330): n is a, c, g, or t
  misc_feature (1333)..(1333): n is a, c, g, or t
  misc_feature (1336)..(1339): n is a, c, g, or t
  misc_feature (1341)..(1342): n is a, c, g, or t
  misc_feature (1344)..(1348): n is a, c, g, or t
  misc_feature (1353)..(1355): n is a, c, g, or t
  misc_feature (1357)..(1357): n is a, c, g, or t
  misc_feature (1359)..(1360): n is a, c, g, or t
  misc_feature (1367)..(1367): n is a, c, g, or t
  misc_feature (1370)..(1370): n is a, c, g, or t
  misc_feature (1373)..(1373): n is a, c, g, or t
  misc_feature (1375)..(1375): n is a, c, g, or t
  misc_feature (1377)..(1377): n is a, c, g, or t
cnaatagagagaattactatgagaggatcgcatcaccatcaccatcacggatcctatttaggtgacactatagaatcgtcgacccacgcgtccggctacttcttcttggacgacacggaccctgatagcatgaaggattttgagatcgtggaccagccgggcttggacatctttggacaggttttcaaccagtggaagagcaaggagtgtgtttgccccaattgcagtcgcagcattgccgcctcccgctttgctccccatctggagaagtgcctgggaatgggtcggaacagcagccgaatcgccaaccgccggattgccaatagcaacaatatgaataagtctgagagtgaccaagaagataatgatgacatcaatgacaacgactggtcctatggctcggagaagaaagccaagaagagaaagtcagacaagaaccccaattcccctcgaagatccaagtcattaaaacacaaaaatggggaacttagcaattcggatccttttaagtataacaattcaactgggatcagctatgagaccctggggccggaggagcttcgcagcctgctaaccacgcaatgtggggtgatttctgaacacaccaagaagatgtgcacaaggtccctgcgctgcccacagcacacagatgagcagaggcgaaccgtacggatttattttctcgggccctcggctgtccttccagaagtcgagagctccctggataatgacagctttgacatgactgacagccaggccctgatcagccggcttcagtgggacggctcctctgacctctcnccctcngaatcaggctncctccaanacgagtgaaaatcagggatggggtnnagggtacccacagctntgantcccggaaaccaanaaaaaaaatnccntctnancctggtagggaatgcccnccgnctaagtttcannaaaaaaaaaaaaccnaaagcccccggggncccccnaaancccnnnanttttnnatnaaatcnccttnacttgggggcnaagggaaancctttggntnaaaaaaanccnntttccctganccccccccnggnggnaaancnnggnaaaagaancncttctgggggtttgggnctnggnaaacttggggggnccnnnnngcaaanaanncnanntnncccccccgggggggggaaaancccnncnangngannnaannccncnnngggggaanccaancngaannttntnctgnnaaaaaattgggggggggggnttttnttttttntgnnnntnngannncnnnnnnnnnggnnnnnntgnnnttnnnnnnnnnncncccccccccaaaannaanccnnnngnnannnnnccccnnngngnntaaaaanaanggncncnccc

SEQ ID NO: 298 - DNA, 1281 bp, Homo Sapiens
  misc_feature (222)..(222): n is a, c, g, or t
  misc_feature (365)..(365): n is a, c, g, or t
  misc_feature (461)..(461): n is a, c, g, or t
  misc_feature (466)..(466): n is a, c, g, or t
  misc_feature (472)..(472): n is a, c, g, or t
  misc_feature (548)..(548): n is a, c, g, or t
  misc_feature (568)..(568): n is a, c, g, or t
  misc_feature (571)..(571): n is a, c, g, or t
  misc_feature (581)..(581): n is a, c, g, or t
  misc_feature (585)..(585): n is a, c, g, or t
  misc_feature (590)..(590): n is a, c, g, or t
  misc_feature (605)..(605): n is a, c, g, or t
  misc_feature (612)..(612): n is a, c, g, or t
  misc_feature (618)..(619): n is a, c, g, or t
  misc_feature (628)..(628): n is a, c, g, or t
  misc_feature (635)..(635): n is a, c, g, or t
  misc_feature (640)..(640): n is a, c, g, or t
  misc_feature (650)..(651): n is a, c, g, or t
  misc_feature (657)..(657): n is a, c, g, or t
  misc_feature (660)..(660): n is a, c, g, or t
  misc_feature (665)..(665): n is a, c, g, or t
  misc_feature (669)..(671): n is a, c, g, or t
  misc_feature (678)..(678): n is a, c, g, or t
  misc_feature (691)..(691): n is a, c, g, or t
  misc_feature (708)..(708): n is a, c, g, or t
  misc_feature (727)..(727): n is a, c, g, or t
  misc_feature (730)..(730): n is a, c, g, or t
  misc_feature (744)..(744): n is a, c, g, or t
  misc_feature (750)..(750): n is a, c, g, or t
  misc_feature (754)..(754): n is a, c, g, or t
  misc_feature (763)..(763): n is a, c, g, or t
  misc_feature (769)..(769): n is a, c, g, or t
  misc_feature (773)..(773): n is a, c, g, or t
  misc_feature (777)..(777): n is a, c, g, or t
  misc_feature (790)..(791): n is a, c, g, or t
  misc_feature (794)..(795): n is a, c, g, or t
  misc_feature (797)..(797): n is a, c, g, or t
  misc_feature (803)..(803): n is a, c, g, or t
  misc_feature (806)..(806): n is a, c, g, or t
  misc_feature (814)..(814): n is a, c, g, or t
  misc_feature (816)..(817): n is a, c, g, or t
  misc_feature (820)..(820): n is a, c, g, or t
  misc_feature (825)..(825): n is a, c, g, or t
  misc_feature (828)..(829): n is a, c, g, or t
  misc_feature (831)..(833): n is a, c, g, or t
  misc_feature (836)..(836): n is a, c, g, or t
  misc_feature (839)..(839): n is a, c, g, or t
  misc_feature (843)..(843): n is a, c, g, or t
  misc_feature (849)..(851): n is a, c, g, or t
  misc_feature (857)..(857): n is a, c, g, or t
  misc_feature (859)..(861): n is a, c, g, or t
  misc_feature (863)..(863): n is a, c, g, or t
  misc_feature (866)..(866): n is a, c, g, or t
  misc_feature (872)..(872): n is a, c, g, or t
  misc_feature (874)..(875): n is a, c, g, or t
  misc_feature (887)..(887): n is a, c, g, or t
  misc_feature (898)..(898): n is a, c, g, or t
  misc_feature (906)..(906): n is a, c, g, or t
  misc_feature (911)..(911): n is a, c, g, or t
  misc_feature (916)..(919): n is a, c, g, or t
  misc_feature (923)..(923): n is a, c, g, or t
  misc_feature (925)..(927): n is a, c, g, or t
  misc_feature (929)..(929): n is a, c, g, or t
  misc_feature (931)..(935): n is a, c, g, or t
  misc_feature (937)..(941): n is a, c, g, or t
  misc_feature (943)..(943): n is a, c, g, or t
  misc_feature (955)..(955): n is a, c, g, or t
  misc_feature (959)..(961): n is a, c, g, or t
  misc_feature (971)..(971): n is a, c, g, or t
  misc_feature (973)..(975): n is a, c, g, or t
  misc_feature (977)..(978): n is a, c, g, or t
  misc_feature (981)..(981): n is a, c, g, or t
  misc_feature (983)..(986): n is a, c, g, or t
  misc_feature (988)..(988): n is a, c, g, or t
  misc_feature (991)..(992): n is a, c, g, or t
  misc_feature (997)..(999): n is a, c, g, or t
  misc_feature (1004)..(1004): n is a, c, g, or t
  misc_feature (1006)..(1006): n is a, c, g, or t
  misc_feature (1012)..(1012): n is a, c, g, or t
  misc_feature (1017)..(1017): n is a, c, g, or t
  misc_feature (1024)..(1024): n is a, c, g, or t
  misc_feature (1033)..(1033): n is a, c, g, or t
  misc_feature (1036)..(1036): n is a, c, g, or t
  misc_feature (1038)..(1038): n is a, c, g, or t
  misc_feature (1041)..(1042): n is a, c, g, or t
  misc_feature (1044)..(1045): n is a, c, g, or t
  misc_feature (1047)..(1047): n is a, c, g, or t
  misc_feature (1051)..(1051): n is a, c, g, or t
  misc_feature (1054)..(1055): n is a, c, g, or t
  misc_feature (1057)..(1062): n is a, c, g, or t
  misc_feature (1066)..(1069): n is a, c, g, or t
  misc_feature (1071)..(1071): n is a, c, g, or t
  misc_feature (1074)..(1074): n is a, c, g, or t
  misc_feature (1080)..(1080): n is a, c, g, or t
  misc_feature (1089)..(1089): n is a, c, g, or t
  misc_feature (1092)..(1092): n is a, c, g, or t
  misc_feature (1097)..(1097): n is a, c, g, or t
  misc_feature (1101)..(1101): n is a, c, g, or t
  misc_feature (1107)..(1107): n is a, c, g, or t
  misc_feature (1109)..(1109): n is a, c, g, or t
  misc_feature (1114)..(1114): n is a, c, g, or t
  misc_feature (1116)..(1116): n is a, c, g, or t
  misc_feature (1124)..(1124): n is a, c, g, or t
  misc_feature (1126)..(1126): n is a, c, g, or t
  misc_feature (1130)..(1132): n is a, c, g, or t
  misc_feature (1134)..(1134): n is a, c, g, or t
  misc_feature (1138)..(1138): n is a, c, g, or t
  misc_feature (1140)..(1140): n is a, c, g, or t
  misc_feature (1142)..(1142): n is a, c, g, or t
  misc_feature (1146)..(1147): n is a, c, g, or t
  misc_feature (1150)..(1150): n is a, c, g, or t
  misc_feature (1152)..(1152): n is a, c, g, or t
  misc_feature (1154)..(1155): n is a, c, g, or t
  misc_feature (1157)..(1157): n is a, c, g, or t
  misc_feature (1160)..(1160): n is a, c, g, or t
  misc_feature (1162)..(1165): n is a, c, g, or t
  misc_feature (1167)..(1167): n is a, c, g, or t
  misc_feature (1169)..(1169): n is a, c, g, or t
  misc_feature (1171)..(1171): n is a, c, g, or t
  misc_feature (1173)..(1173): n is a, c, g, or t
  misc_feature (1177)..(1177): n is a, c, g, or t
  misc_feature (1181)..(1183): n is a, c, g, or t
  misc_feature (1185)..(1186): n is a, c, g, or t
  misc_feature (1188)..(1188): n is a, c, g, or t
  misc_feature (1190)..(1192): n is a, c, g, or t
  misc_feature (1194)..(1195): n is a, c, g, or t
  misc_feature (1199)..(1199): n is a, c, g, or t
  misc_feature (1202)..(1203): n is a, c, g, or t
  misc_feature (1208)..(1208): n is a, c, g, or t
  misc_feature (1210)..(1210): n is a, c, g, or t
  misc_feature (1212)..(1212): n is a, c, g, or t
  misc_feature (1215)..(1216): n is a, c, g, or t
  misc_feature (1218)..(1219): n is a, c, g, or t
  misc_feature (1225)..(1227): n is a, c, g, or t
  misc_feature (1233)..(1233): n is a, c, g, or t
  misc_feature (1235)..(1237): n is a, c, g, or t
  misc_feature (1239)..(1240): n is a, c, g, or t
  misc_feature (1242)..(1242): n is a, c, g, or t
  misc_feature (1244)..(1245): n is a, c, g, or t
  misc_feature (1247)..(1248): n is a, c, g, or t
  misc_feature (1253)..(1253): n is a, c, g, or t
  misc_feature (1259)..(1259): n is a, c, g, or t
  misc_feature (1262)..(1262): n is a, c, g, or t
  misc_feature (1264)..(1264): n is a, c, g, or t
  misc_feature (1266)..(1266): n is a, c, g, or t
  misc_feature (1270)..(1270): n is a, c, g, or t
  misc_feature (1272)..(1273): n is a, c, g, or t
  misc_feature (1275)..(1275): n is a, c, g, or t
  misc_feature (1278)..(1280): n is a, c, g, or t
aatagagaaattactatgagaggatcgcatcaccatcaccatcacggatcctatttaggtgacactatagaatcgtcgacccacgcgtccgggttgagctgctgccgccgccgcctctgtcgtcgtcgcgagtgtggagtcgggactggagctgctgccgcggcgacgccggggatctttgtcgctagctcccggcccttctgccccgccgccttccctcantcagcgttgcccactcctctccggccgggcgcccctgcctccatttctcgctctctgtccaccacacacacggcccccccgatcatggatccgggcagtggcggcggcggcggcggcggcggcggcggcggcgggagcagcancggcagcagcagcagcgactcggcgcctgactgctgggaccaggcggacatggaagcccccgggccgggcccttgcggcggcggcggctccctggnggcgncggccnaggcccagcgggagaacctcagcgcggccttcatccggcaactcaacgtcaacgccaagcccttcgtgcccaacgnccacgccgccgagttcgtgncgnccttcctgcngtgnccggnagcgccgccaccccnagctggnggcacnnccaataacnaacgganccggnatcggcgcgnnaagccntgngacanctgnnnaatcctntcaagaggaatantcattgtgtgaaggttnaaatttcaactgttaaacntgnaacttttcaaaaanctattntaanaaaatgganaaacanaaantgtnttccaaaataatnntgnnanaaaaanaanaaaataantnnaanaaaanaanngnnnggnttntttnaaaaannnaaaggntnnnanaanaaaatncnnataaaattatgnaaaaaaaatanaaaatccnaaaanctaannnnaaantnnnancnnnnngnnnnncntaaaaaaaaaantaannngaaaattaantnnnanntanannnngnaannttaannnattgnanaaaaanaattnatttaantgaaaagtnttnanaannanntnttanaanntnnnnnnaaannnnanaanaaaaanaaaaaattnttnattantttnttttananataantntaaaaaananaaannntntaantntnaatnnaantnanntnttnannnnananantntttnaaannnanntntnnnannaaanttnnaaaanananaannanntttaannnatatanannntnnantnnannaaaanaaaaanaantnanaaanannanttnnna

SEQ ID NO: 299 - DNA, 1387 bp, Homo Sapiens
  misc_feature (1)..(1): n is a, c, g, or t
  misc_feature (943)..(943): n is a, c, g, or t
  misc_feature (948)..(948): n is a, c, g, or t
  misc_feature (964)..(964): n is a, c, g, or t
  misc_feature (970)..(970): n is a, c, g, or t
  misc_feature (973)..(973): n is a, c, g, or t
  misc_feature (998)..(998): n is a, c, g, or t
  misc_feature (1005)..(1005): n is a, c, g, or t
  misc_feature (1039)..(1040): n is a, c, g, or t
  misc_feature (1056)..(1057): n is a, c, g, or t
  misc_feature (1060)..(1061): n is a, c, g, or t
  misc_feature (1070)..(1070): n is a, c, g, or t
  misc_feature (1072)..(1072): n is a, c, g, or t
  misc_feature (1106)..(1106): n is a, c, g, or t
  misc_feature (1123)..(1125): n is a, c, g, or t
  misc_feature (1128)..(1128): n is a, c, g, or t
  misc_feature (1134)..(1134): n is a, c, g, or t
  misc_feature (1147)..(1147): n is a, c, g, or t
  misc_feature (1149)..(1149): n is a, c, g, or t
  misc_feature (1151)..(1151): n is a, c, g, or t
  misc_feature (1154)..(1154): n is a, c, g, or t
  misc_feature (1160)..(1160): n is a, c, g, or t
  misc_feature (1162)..(1162): n is a, c, g, or t
  misc_feature (1164)..(1165): n is a, c, g, or t
  misc_feature (1175)..(1175): n is a, c, g, or t
  misc_feature (1179)..(1179): n is a, c, g, or t
  misc_feature (1191)..(1192): n is a, c, g, or t
  misc_feature (1197)..(1198): n is a, c, g, or t
  misc_feature (1200)..(1200): n is a, c, g, or t
  misc_feature (1218)..(1218): n is a, c, g, or t
  misc_feature (1226)..(1226): n is a, c, g, or t
  misc_feature (1231)..(1231): n is a, c, g, or t
  misc_feature (1248)..(1248): n is a, c, g, or t
  misc_feature (1254)..(1254): n is a, c, g, or t
  misc_feature (1257)..(1257): n is a, c, g, or t
  misc_feature (1268)..(1269): n is a, c, g, or t
  misc_feature (1272)..(1272): n is a, c, g, or t
  misc_feature (1275)..(1275): n is a, c, g, or t
  misc_feature (1295)..(1295): n is a, c, g, or t
  misc_feature (1302)..(1304): n is a, c, g, or t
  misc_feature (1311)..(1311): n is a, c, g, or t
  misc_feature (1322)..(1322): n is a, c, g, or t
  misc_feature (1325)..(1325): n is a, c, g, or t
  misc_feature (1340)..(1341): n is a, c, g, or t
  misc_feature (1343)..(1343): n is a, c, g, or t
  misc_feature (1349)..(1354): n is a, c, g, or t
  misc_feature (1356)..(1356): n is a, c, g, or t
  misc_feature (1358)..(1359): n is a, c, g, or t
  misc_feature (1362)..(1362): n is a, c, g, or t
  misc_feature (1370)..(1370): n is a, c, g, or t
  misc_feature (1373)..(1373): n is a, c, g, or t
  misc_feature (1375)..(1375): n is a, c, g, or t
  misc_feature (1377)..(1381): n is a, c, g, or t
  misc_feature (1383)..(1384): n is a, c, g, or t
  misc_feature (1386)..(1386): n is a, c, g, or t
naatagagaaattactatgagaggatcgcatcaccatcaccatcacggatcctatttaggtgacactatagaatcgtcgacccacgcgtccgatagcttaccgcaaggatcagactgttgctggacacgacgtctgtgtggagccaggaggaacacatgtggtgtctgtatggctgctctctacctaggacaccagctgccacttcttttgcctcatgaagaactcttgggccagccaaactgggaacctaggtgtctgggtcttgtgacaaccaaagcactttgacactaccccctgccgagagaagaggagtggatgagcctgcgggtttgcctcaagaaacttcatgagggtctcttactaactccattacactctctctcctggagcctcatctccatgtcaagcaggagggtaaagaagggaactaagagcaggtctttcaagccacacccccacctgcggatggatgggtttctctgtaggccatgcaggcctttgtcgcagcaaaccttcccagcagcccttgagccaagtaaaaccagcacaaccagccaccagtggttggtgaggcagtgcccacaaggctcatgttgtatgcctttgataaggccatcttggctttgagtagcagtgttcctcgtcacccatttccccctcaggattacaacacctgctatcaaatcatctaagctgaaaacatgagatgcgcttggaaaggcctagtcagaagccatttcctcttatcatttccctctcctatgcaccagtaaggcccgtccagagccccagcagggagtgggccctgagtccacactgtccctgagtgatccaggaggctgcccacatcccccacatgtgcactgtggttccagtgtagctgctgtgagcccactgccactgcctcaaaagggagccactgtgaacctctcgagtggctcnaaaancagtggcttttttganaatggnccnatacttctggcccggctggatgaanggaatgnccaaccctttggcctctccccctccttccatttnnttctctctcttggccnnatnnctcttttcnanttcaaaaaaaaaaaaaaaaaaaaaaaaggggcgnccccccccctaaagggnnnccnaataancttaaattaactnancntgnaccccngntnnaaaaatcccnaaangacccccaaaannccctnngnatttttcaaaaaccccgnttgccccnggggntttttttttggggaaanccaacnacntgggaaatttnnggnccnagaaccaaaagggaaaaaantcctggnnnacccccnttaaatccccnggnccccaaaaaaatttnngngttttnnnnnngncnnggncaaaaccnacncncnnnnntnncnc

SEQ ID NO: 300 - DNA, 256 bp, Homo Sapiens
  misc_feature (7)..(7): n is a, c, g, or t
ttagagnaattactatgagaggatcgcatcaccatcaccatcacggatcctatttaggtgacactatagaatcgtcgacccacgcgtccgctccatctcgcccatctccagattcttcagaaagtgactgggaaactttggatcctagtgtcttagaggaccccaacttgaaagaaagggaacagctgggatcagaccagacaaatttgtttccaaaggactctgtcccctcagagagtcttccaattactgtaca

SEQ ID NO: 301 - DNA, 1207 bp, Homo Sapiens
  misc_feature (1)..(1): n is a, c, g, or t
  misc_feature (824)..(824): n is a, c, g, or t
  misc_feature (911)..(911): n is a, c, g, or t
  misc_feature (940)..(940): n is a, c, g, or t
  misc_feature (942)..(942): n is a, c, g, or t
  misc_feature (967)..(967): n is a, c, g, or t
  misc_feature (974)..(974): n is a, c, g, or t
  misc_feature (978)..(978): n is a, c, g, or t
  misc_feature (988)..(988): n is a, c, g, or t
  misc_feature (1011)..(1011): n is a, c, g, or t
  misc_feature (1033)..(1033): n is a, c, g, or t
  misc_feature (1036)..(1036): n is a, c, g, or t
  misc_feature (1045)..(1045): n is a, c, g, or t
  misc_feature (1047)..(1047): n is a, c, g, or t
  misc_feature (1052)..(1052): n is a, c, g, or t
  misc_feature (1056)..(1056): n is a, c, g, or t
  misc_feature (1071)..(1071): n is a, c, g, or t
  misc_feature (1075)..(1075): n is a, c, g, or t
  misc_feature (1081)..(1082): n is a, c, g, or t
  misc_feature (1101)..(1101): n is a, c, g, or t
  misc_feature (1111)..(1112): n is a, c, g, or t
  misc_feature (1117)..(1117): n is a, c, g, or t
  misc_feature (1119)..(1119): n is a, c, g, or t
  misc_feature (1121)..(1121): n is a, c, g, or t
  misc_feature (1129)..(1130): n is a, c, g, or t
  misc_feature (1137)..(1138): n is a, c, g, or t
  misc_feature (1140)..(1140): n is a, c, g, or t
  misc_feature (1145)..(1145): n is a, c, g, or t
  misc_feature (1153)..(1154): n is a, c, g, or t
  misc_feature (1158)..(1158): n is a, c, g, or t
  misc_feature (1168)..(1168): n is a, c, g, or t
  misc_feature (1170)..(1170): n is a, c, g, or t
  misc_feature (1176)..(1177): n is a, c, g, or t
  misc_feature (1182)..(1182): n is a, c, g, or t
  misc_feature (1189)..(1189): n is a, c, g, or t
  misc_feature (1191)..(1191): n is a, c, g, or t
  misc_feature (1195)..(1196): n is a, c, g, or t
  misc_feature (1200)..(1201): n is a, c, g, or t
  misc_feature (1207)..(1207): n is a, c, g, or t
naattagagaaattactatgagaggatcgcatcaccatcaccatcacggatcctatttaggtgacactatagaatcgtcgacccacgcgtccggtgggaggggaggagtggagatggcggcggcggcggctcaggggggcgggggcggggagccccgtagaaccgagggggtcggcccgggggtcccgggggaggtggagatggtgaaggggcagccgttcgacgtgggcccgcgctacacgcagttgcagtacatcggcgagggcgcgtacggcatggtcagctcggcctatgaccacgtgcgcaagactcgcgtggccatcaagaagatcagccccttcgaacatcagacctactgccagcgcacgctccgggagatccagatcctgctgcgcttccgccatgagaatgtcatcggcatccgagacattctgcgggcgtccaccctggaagccatgagagatgtctacattgtgcaggacctgatggagactgacctgtacaagttgctgaaaagccagcagctgagcaatgaccatatctgctacttcctctaccagatcctgcggggcctcaagtacatccactccgccaacgtgctccaccgagatctaaagccctccaacctgctcatcaacaccacctgcgaccttaagatttgtgatttcggcctggcccggattgccgatcctgagcatgaccacaccggcttcctgacggagtatgtggctacgcgctggtaccgggccccagagatcatgctgaactccaagggctataccaagtccatcgacatctggtctgtgggctgcattctggctganatgctctctaaccggcccatcttcctggcaagcactacctggatcagctcaaccacattctgggcatcctgggctccccatcccagnaggacctgaattgtatcatcaacatgaangnccgaaactacctacagtctctgccntccaaancaangtggctgggnccaagcttttccccaagtcaaantccaaagcctttgacctgctgnacngaattttancntttancccnataaacgaatccagnggangaaagnncttggttccccctacttgnaacaatattnnacccnangnataacccnnggcccannanccttnccttcccnnggantggagacctncnaaggannggttnaggattntntccnnaaanncccctn

SEQ ID NO: 302 - DNA, 256 bp, Homo Sapiens
  misc_feature (15)..(15): n is a, c, g, or t
  misc_feature (17)..(17): n is a, c, g, or t
  misc_feature (21)..(21): n is a, c, g, or t
tattaagaggagttntnactntgagaggatcgcatacctaccatcacggatcctatttaggtgacactatagaatcgtcgacccacgcgtccgacaacaaagaagtgcacaagtctgggtacctcagctctgagcggctgatccctcaaagagtgatggaccagcacaaacttaccagggaccagtgggaggaccggatccaggtgtggcatgcggaacaccgtgggatgctcaaagataatgctatgttggaata

SEQ ID NO: 303 - DNA, 256 bp, Homo Sapiens
  misc_feature (2)..(2): n is a, c, g, or t
  misc_feature (4)..(4): n is a, c, g, or t
tnanctatgagaggatcgcatcaccatcaccatcacggatcctatttaggtgacactatagaatcgtcgacccacgcgtccggccccacaccccaccagacagtgcgcctggaggccctggatgagagtggcagctactgggtcagtgacaagaggctgcccccctgctcactcagccaggccctcacctacttcctggacatcaccacacccccaacccagctgctgctccaaaagctggcccaggtggccacag

SEQ ID NO: 304 - DNA, 256 bp, Homo Sapiens
  misc_feature (1)..(1): n is a, c, g, or t
ntcctatgagaggatcgcatcaccatcaccatcacggatcctatttaggtgacactatagaatcgtcgacccacgcgtccgcccacgcgtccggcaagatggcggccaccagtggaactgatgagccggtttccggggagttggtgtctgtggcacatgcgctttctctcccagcagagtcgtatggcaacgatcctgacattgagatggcttgggccatgagagcaatgcagcatgctgaagtctattacaagct

SEQ ID NO: 305 - DNA, 1367 bp, Homo Sapiens
  misc_feature (931)..(931): n is a, c, g, or t
  misc_feature (951)..(951): n is a, c, g, or t
  misc_feature (978)..(978): n is a, c, g, or t
  misc_feature (1006)..(1006): n is a, c, g, or t
  misc_feature (1014)..(1014): n is a, c, g, or t
  misc_feature (1019)..(1019): n is a, c, g, or t
  misc_feature (1021)..(1022): n is a, c, g, or t
  misc_feature (1049)..(1049): n is a, c, g, or t
  misc_feature (1051)..(1051): n is a, c, g, or t
  misc_feature (1054)..(1054): n is a, c, g, or t
  misc_feature (1059)..(1059): n is a, c, g, or t
  misc_feature (1061)..(1061): n is a, c, g, or t
  misc_feature (1064)..(1064): n is a, c, g, or t
  misc_feature (1068)..(1068): n is a, c, g, or t
  misc_feature (1076)..(1076): n is a, c, g, or t
  misc_feature (1079)..(1079): n is a, c, g, or t
  misc_feature (1084)..(1084): n is a, c, g, or t
  misc_feature (1092)..(1092): n is a, c, g, or t
  misc_feature (1096)..(1096): n is a, c, g, or t
  misc_feature (1106)..(1106): n is a, c, g, or t
  misc_feature (1109)..(1109): n is a, c, g, or t
  misc_feature (1112)..(1112): n is a, c, g, or t
  misc_feature (1120)..(1121): n is a, c, g, or t
  misc_feature (1125)..(1125): n is a, c, g, or t
  misc_feature (1138)..(1138): n is a, c, g, or t
  misc_feature (1142)..(1142): n is a, c, g, or t
  misc_feature (1148)..(1148): n is a, c, g, or t
  misc_feature (1155)..(1155): n is a, c, g, or t
  misc_feature (1159)..(1159): n is a, c, g, or t
  misc_feature (1170)..(1170): n is a, c, g, or t
  misc_feature (1175)..(1175): n is a, c, g, or t
  misc_feature (1177)..(1177): n is a, c, g, or t
  misc_feature (1183)..(1183): n is a, c, g, or t
  misc_feature (1193)..(1193): n is a, c, g, or t
  misc_feature (1196)..(1197): n is a, c, g, or t
  misc_feature (1201)..(1201): n is a, c, g, or t
  misc_feature (1208)..(1208): n is a, c, g, or t
  misc_feature (1213)..(1213): n is a, c, g, or t
  misc_feature (1222)..(1224): n is a, c, g, or t
  misc_feature (1229)..(1229): n is a, c, g, or t
  misc_feature (1242)..(1242): n is a, c, g, or t
  misc_feature (1249)..(1249): n is a, c, g, or t
  misc_feature (1254)..(1254): n is a, c, g, or t
  misc_feature (1261)..(1261): n is a, c, g, or t
  misc_feature (1273)..(1273): n is a, c, g, or t
  misc_feature (1281)..(1282): n is a, c, g, or t
  misc_feature (1284)..(1284): n is a, c, g, or t
  misc_feature (1287)..(1288): n is a, c, g, or t
  misc_feature (1292)..(1292): n is a, c, g, or t
  misc_feature (1297)..(1297): n is a, c, g, or t
  misc_feature (1306)..(1306): n is a, c, g, or t
  misc_feature (1314)..(1314): n is a, c, g, or t
  misc_feature (1323)..(1323): n is a, c, g, or t
  misc_feature (1328)..(1328): n is a, c, g, or t
  misc_feature (1330)..(1332): n is a, c, g, or t
  misc_feature (1335)..(1336): n is a, c, g, or t
  misc_feature (1342)..(1342): n is a, c, g, or t
  misc_feature (1350)..(1350): n is a, c, g, or t
  misc_feature (1358)..(1358): n is a, c, g, or t
  misc_feature (1362)..(1362): n is a, c, g, or t
  misc_feature (1365)..(1365): n is a, c, g, or t
  misc_feature (1367)..(1367): n is a, c, g, or t
tagagaaattactatgagaggatcgcatcaccatcaccatcacggatcctatttaggtgacactatagaatcgtcgacccacgcgtccgagcccaagcctctggaagagccaaaacacgagaccaaaaagctgaagaatctttcagagtacgctcagacactacagctgggttggaatgggcttctggtgttgaaaaacagctgcttccccacgtctatgcatatcctagagggggaccagggggtgatcagcagtctcctcaaagaccacacttctgggagcaagctgacccagctgaagatcgcccagcgccttcgactggaccagcccaagcttgacgaggtcacacgacgcatcaagcaggggagccccaacggctatgcggtcctcttagccacccaggcaacccccagtgggcttggcactgaggggatgcccacagtagagcccggtctgcagaggcggcttctcaggaacctggtctcctacttgaaacagaagcaggccgcaggggtgatcagcttgccagtgggggggtccaagggcagagacggcacaggcatgctctacgccttcccaccctgcgacttttcccagcagtacctccagtcagcactaaggacattgggcaagctagaagaagaacacatggtgatagtcatcgtcagagacactgcctagcccaagcctgtctttcccagcgtcatgtttgtgtcacaaaagcagttattttaaaatctgatcccctctctaccctaccactttggtttgaattatctcctgggttattttggttcatttgggtggggatcaaagtcctgtccaccaccaaaactaagttcttagattttgggggattttttttttaaacgatgagaagggaatccggttatgttgatttctagtgtacaagatactgtctgctggggntctgtatttttttatttttngaccaactgtatggaaagttgtcagtnaaaacctttgacagaggatggatttttnaaacctgnttcananntcctggtttaatcaatcaagctaaaanantcnaaaantnccntagngcatgtanacnaatgncctaagtnatcnttcaacaccntgntgnatgggtcnntctnggcctctcaattnttcnggccantctggancctnacttaacctcnttttntnttgggngaaaacaggnaanntttntttgggntgggnaacctcccnnnaaccntgaataaaacccnttcaaanaaagnatggggntaacccaagccnggggcccnncnacnnaagnttttncccctaacngggggggnccccccccnatttnannnggnntttttngaaaaaancccccccntttnggncn

SEQ ID NO: 306 - DNA, 1200 bp, Homo Sapiens
  misc_feature (765)..(765): n is a, c, g, or t
  misc_feature (909)..(909): n is a, c, g, or t
  misc_feature (912)..(912): n is a, c, g, or t
  misc_feature (926)..(926): n is a, c, g, or t
  misc_feature (941)..(941): n is a, c, g, or t
  misc_feature (967)..(967): n is a, c, g, or t
  misc_feature (977)..(977): n is a, c, g, or t
  misc_feature (986)..(986): n is a, c, g, or t
  misc_feature (988)..(988): n is a, c, g, or t
  misc_feature (1013)..(1013): n is a, c, g, or t
  misc_feature (1051)..(1051): n is a, c, g, or t
  misc_feature (1060)..(1060): n is a, c, g, or t
  misc_feature (1063)..(1063): n is a, c, g, or t
  misc_feature (1082)..(1082): n is a, c, g, or t
  misc_feature (1088)..(1088): n is a, c, g, or t
  misc_feature (1095)..(1095): n is a, c, g, or t
  misc_feature (1100)..(1100): n is a, c, g, or t
  misc_feature (1102)..(1102): n is a, c, g, or t
  misc_feature (1115)..(1115): n is a, c, g, or t
  misc_feature (1117)..(1117): n is a, c, g, or t
  misc_feature (1122)..(1122): n is a, c, g, or t
  misc_feature (1128)..(1128): n is a, c, g, or t
  misc_feature (1132)..(1132): n is a, c, g, or t
  misc_feature (1134)..(1134): n is a, c, g, or t
  misc_feature (1137)..(1138): n is a, c, g, or t
  misc_feature (1140)..(1142): n is a, c, g, or t
  misc_feature (1144)..(1144): n is a, c, g, or t
  misc_feature (1149)..(1149): n is a, c, g, or t
  misc_feature (1172)..(1172): n is a, c, g, or t
  misc_feature (1177)..(1178): n is a, c, g, or t
  misc_feature (1181)..(1183): n is a, c, g, or t
  misc_feature (1185)..(1187): n is a, c, g, or t
  misc_feature (1190)..(1190): n is a, c, g, or t
  misc_feature (1192)..(1192): n is a, c, g, or t
  misc_feature (1200)..(1200): n is a, c, g, or t
tagagagaattactatgagaggatcgcatcaccatcaccatcacggatcctatttaggtgacactatagaatcgtcgacccacgcgtccggccgccgagtggtctgtgcaggttcgcgggtcgctggcgggggtcgtgagggagtgcgccgggagcggagatatggagggagatggttcagacccagagcctccagatgccggggaggacagcaagtccgagaatggggagaatgcgcccatctactgcatctgccgcaaaccggacatcaactgcttcatgatcgggtgtgacaactgcaatgagtggttccatggggactgcatccggatcactgagaagatggccaaggccatccgggagtggtactgtcgggagtgcagagagaaagaccccaagctagagattcgctatcggcacaagaagtcacgggagcgggatggcaatgagcgggacagcagtgagccccgggatgagggtggagggcgcaagaggcctgtccctgatccagacctgcagcgccgggcagggtcagggacaggggttggggccatgcttgctcggggctctgcttcgccccacaaatcctctccgcagcccttggtggccacacccagccagcatcaccagcagcagcagcagcagatcaaacggtcagcccgcatgtgtggtgagtgtgaggcatgtcggcgcactgaggactgtggtcactgtgatttctgtcgggacatgaagaagttcgggggccccaacaagatccggcanaagtgccggctgcgccagtgccagctgcgggcccgggaatcgtacaagtacttcccttcctcgctctcaccagtgacgccctcaaagtccctgccaaggccccgccggccactgcccacccaacagcagccacagccatcacanaanttagggcccatccntgaaaatgaaggggncagtggcgtcatcaacagtcaaggancctcctgagnctacagccncncctgaacccctctcaaataagaacntacctctggatcctgacctgtatcaggacttttgtgcngggcctttnatnaccatggcctgccctgaanaacaanaaaaaantcccntnctgaccccccctncnaaaanggcatnaaantnaanntnnnanccccngaaaaaaatttaaaaaaaaaggnggacnnaannncnnnttngnaaaccaan

SEQ ID NO: 307 - DNA, 1316 bp, Homo Sapiens
  misc_feature (4)..(4): n is a, c, g, or t
  misc_feature (721)..(721): n is a, c, g, or t
  misc_feature (759)..(759): n is a, c, g, or t
  misc_feature (766)..(766): n is a, c, g, or t
  misc_feature (777)..(777): n is a, c, g, or t
  misc_feature (783)..(783): n is a, c, g, or t
  misc_feature (797)..(797): n is a, c, g, or t
  misc_feature (808)..(808): n is a, c, g, or t
  misc_feature (822)..(822): n is a, c, g, or t
  misc_feature (855)..(855): n is a, c, g, or t
  misc_feature (889)..(889): n is a, c, g, or t
  misc_feature (893)..(893): n is a, c, g, or t
  misc_feature (897)..(897): n is a, c, g, or t
  misc_feature (914)..(914): n is a, c, g, or t
  misc_feature (929)..(929): n is a, c, g, or t
  misc_feature (931)..(932): n is a, c, g, or t
  misc_feature (934)..(934): n is a, c, g, or t
  misc_feature (936)..(936): n is a, c, g, or t
  misc_feature (938)..(944): n is a, c, g, or t
  misc_feature (946)..(963): n is a, c, g, or t
  misc_feature (965)..(971): n is a, c, g, or t
  misc_feature (973)..(993): n is a, c, g, or t
  misc_feature (1000)..(1001): n is a, c, g, or t
  misc_feature (1003)..(1003): n is a, c, g, or t
  misc_feature (1005)..(1005): n is a, c, g, or t
  misc_feature (1013)..(1014): n is a, c, g, or t
  misc_feature (1018)..(1018): n is a, c, g, or t
  misc_feature (1020)..(1021): n is a, c, g, or t
  misc_feature (1023)..(1023): n is a, c, g, or t
  misc_feature (1028)..(1028): n is a, c, g, or t
  misc_feature (1030)..(1030): n is a, c, g, or t
  misc_feature (1034)..(1035): n is a, c, g, or t
  misc_feature (1040)..(1041): n is a, c, g, or t
  misc_feature (1044)..(1044): n is a, c, g, or t
  misc_feature (1047)..(1047): n is a, c, g, or t
  misc_feature (1052)..(1053): n is a, c, g, or t
  misc_feature (1056)..(1058): n is a, c, g, or t
  misc_feature (1065)..(1065): n is a, c, g, or t
  misc_feature (1068)..(1068): n is a, c, g, or t
  misc_feature (1070)..(1070): n is a, c, g, or t
  misc_feature (1072)..(1073): n is a, c, g, or t
  misc_feature (1079)..(1079): n is a, c, g, or t
  misc_feature (1083)..(1084): n is a, c, g, or t
  misc_feature (1090)..(1090): n is a, c, g, or t
  misc_feature (1097)..(1098): n is a, c, g, or t
  misc_feature (1114)..(1114): n is a, c, g, or t
  misc_feature (1117)..(1117): n is a, c, g, or t
  misc_feature (1122)..(1122): n is a, c, g, or t
  misc_feature (1127)..(1127): n is a, c, g, or t
  misc_feature (1132)..(1132): n is a, c, g, or t
  misc_feature (1145)..(1145): n is a, c, g, or t
  misc_feature (1147)..(1147): n is a, c, g, or t
  misc_feature (1155)..(1155): n is a, c, g, or t
  misc_feature (1157)..(1157): n is a, c, g, or t
  misc_feature (1160)..(1161): n is a, c, g, or t
  misc_feature (1165)..(1165): n is a, c, g, or t
  misc_feature (1170)..(1171): n is a, c, g, or t
  misc_feature (1179)..(1179): n is a, c, g, or t
  misc_feature (1183)..(1184): n is a, c, g, or t
  misc_feature (1188)..(1188): n is a, c, g, or t
  misc_feature (1191)..(1194): n is a, c, g, or t
  misc_feature (1198)..(1199): n is a, c, g, or t
  misc_feature (1213)..(1213): n is a, c, g, or t
  misc_feature (1216)..(1216): n is a, c, g, or t
  misc_feature (1221)..(1221): n is a, c, g, or t
  misc_feature (1223)..(1223): n is a, c, g, or t
  misc_feature (1226)..(1226): n is a, c, g, or t
  misc_feature (1236)..(1236): n is a, c, g, or t
  misc_feature (1238)..(1238): n is a, c, g, or t
  misc_feature (1243)..(1243): n is a, c, g, or t
  misc_feature (1246)..(1246): n is a, c, g, or t
  misc_feature (1248)..(1248): n is a, c, g, or t
  misc_feature (1251)..(1252): n is a, c, g, or t
  misc_feature (1254)..(1254): n is a, c, g, or t
  misc_feature (1256)..(1256): n is a, c, g, or t
  misc_feature (1273)..(1273): n is a, c, g, or t
  misc_feature (1279)..(1284): n is a, c, g, or t
  misc_feature (1286)..(1286): n is a, c, g, or t
  misc_feature (1288)..(1288): n is a, c, g, or t
  misc_feature (1290)..(1290): n is a, c, g, or t
  misc_feature (1292)..(1299): n is a, c, g, or t
  misc_feature (1305)..(1305): n is a, c, g, or t
  misc_feature (1309)..(1309): n is a, c, g, or t
  misc_feature (1316)..(1316): n is a, c, g, or t
attngagaaattactatgagaggatcgcatcaccatcaccatcacggatcctatttaggtgacactatagaatcgtcgacccacgcgtccgcccaggccccagcccagcaggacctgcaggggacgagccagccgagagcccatcggagaccccaggcccccgcccagcaggacctgcaggggacgagccagccgagagcccatcggagaccccaggcccccgcccggcaggacctgcaggggacgagccagccgagagcccatcggagaccccaggccccagcccggcaggacctacaagggatgagccagccgagagcccatcggagaccccaggcccccgcccggcaggacctgcaggggacgagccagccgagagcccatcggagaccccaggcccccgcccggcaggacctgcaggggacgagccagccgagagcccatcggagaccccaggccccagcccggcaggacctacaagggatgagccagccaaggcgggggaggcagcagagttgcaggacgcagaggtggagtcttctgccaagtctgggaagccttaaggaaaggagtgcccgtcggcgtcttggtcctcctgtccctgctgcaggggctggggcctccggagctgctgcgggctcccctcaggctctgcttcgtgacccgtgacccatgacccacagtgctggcctcctgtggggccactatagcagcccaccanaaagccgcgaggccctcagggaagcccaaggcctgcanaagcctncctggcctggntgtgtntttccccacccagnttttcccctgngccccttgtttttnttaattgaccctttttggaatgggggggcggcnggcaaggctgctttttctttattctgataccaancaanggcntttttttgaataaattntttttgactttttgnannananannnnnnnannnnnnnnnnnnnnnnnntnnnnnnntnnnnnnnnnnnnnnnnnnnnnggggggnncncntcccttanngggngnncntattnancttnnttttnnttnaanttggnntcnnntttttanaantncnntaatgncttnnaaaatncttttgnnttttttttaaaaaccnttnttttnccccnggggntttttttttttgngnaaaattcnanctnntttntgggnnattttttngggnntttnggnnnntttnnatgggaaaaaaaanttntgggntnttncccccctttntnttttnccngnggnntntnaaaaaattttttggggntttttnnnnnntntncnannnnnnnnaaaaanaaanttttttn

SEQ ID NO: 308 - DNA, 256 bp, Homo Sapiens
  misc_feature (3)..(3): n is a, c, g, or t
  misc_feature (18)..(18): n is a, c, g, or t
  misc_feature (22)..(22): n is a, c, g, or t
  misc_feature (38)..(38): n is a, c, g, or t
  misc_feature (40)..(40): n is a, c, g, or t
  misc_feature (42)..(42): n is a, c, g, or t
  misc_feature (45)..(45): n is a, c, g, or t
ttnttaagaggagaaatnactntgagaggatcgatacntncnatncggatcctatttaggtgacactatagaatcgtcgacccacgcgtccgcggacgcgtgggaaataacactatatccagacaagcatgggtgtgtccgggacctgttagaagaatgtaaaaaggccgtggagcttggggagaaagcatcagggaaacttaggctgctagaaattgtaagctacaaaatcattggtgttcatcaagaagatgaa

SEQ ID NO: 309 - DNA, 1254 bp, Homo Sapiens
  misc_feature (141)..(141): n is a, c, g, or t
  misc_feature (143)..(143): n is a, c, g, or t
  misc_feature (160)..(160): n is a, c, g, or t
  misc_feature (194)..(194): n is a, c, g, or t
  misc_feature (205)..(205): n is a, c, g, or t
  misc_feature (211)..(213): n is a, c, g, or t
  misc_feature (215)..(215): n is a, c, g, or t
  misc_feature (245)..(245): n is a, c, g, or t
  misc_feature (254)..(254): n is a, c, g, or t
  misc_feature (268)..(269): n is a, c, g, or t
  misc_feature (289)..(289): n is a, c, g, or t
  misc_feature (296)..(296): n is a, c, g, or t
  misc_feature (305)..(306): n is a, c, g, or t
  misc_feature (308)..(308): n is a, c, g, or t
  misc_feature (317)..(318): n is a, c, g, or t
  misc_feature (320)..(321): n is a, c, g, or t
  misc_feature (330)..(330): n is a, c, g, or t
  misc_feature (332)..(332): n is a, c, g, or t
  misc_feature (335)..(335): n is a, c, g, or t
  misc_feature (347)..(347): n is a, c, g, or t
  misc_feature (353)..(353): n is a, c, g, or t
  misc_feature (377)..(377): n is a, c, g, or t
  misc_feature (384)..(384): n is a, c, g, or t
  misc_feature (392)..(392): n is a, c, g, or t
  misc_feature (395)..(395): n is a, c, g, or t
  misc_feature (405)..(405): n is a, c, g, or t
  misc_feature (425)..(425): n is a, c, g, or t
  misc_feature (427)..(427): n is a, c, g, or t
  misc_feature (437)..(438): n is a, c, g, or t
  misc_feature (444)..(444): n is a, c, g, or t
  misc_feature (448)..(448): n is a, c, g, or t
  misc_feature (459)..(459): n is a, c, g, or t
  misc_feature (482)..(482): n is a, c, g, or t
  misc_feature (487)..(488): n is a, c, g, or t
  misc_feature (490)..(491): n is a, c, g, or t
  misc_feature (494)..(494): n is a, c, g, or t
  misc_feature (523)..(523): n is a, c, g, or t
  misc_feature (527)..(527): n is a, c, g, or t
  misc_feature (532)..(533): n is a, c, g, or t
  misc_feature (539)..(539): n is a, c, g, or t
  misc_feature (544)..(544): n is a, c, g, or t
  misc_feature (548)..(548): n is a, c, g, or t
  misc_feature (550)..(550): n is a, c, g, or t
  misc_feature (574)..(574): n is a, c, g, or t
  misc_feature (577)..(578): n is a, c, g, or t
  misc_feature (589)..(589): n is a, c, g, or t
  misc_feature (591)..(591): n is a, c, g, or t
  misc_feature (612)..(612): n is a, c, g, or t
  misc_feature (623)..(623): n is a, c, g, or t
  misc_feature (626)..(626): n is a, c, g, or t
  misc_feature (633)..(634): n is a, c, g, or t
  misc_feature (677)..(677): n is a, c, g, or t
  misc_feature (681)..(681): n is a, c, g, or t
  misc_feature (716)..(716): n is a, c, g, or t
  misc_feature (744)..(744): n is a, c, g, or t
  misc_feature (756)..(756): n is a, c, g, or t
  misc_feature (758)..(758): n is a, c, g, or t
  misc_feature (770)..(770): n is a, c, g, or t
  misc_feature (782)..(783): n is a, c, g, or t
  misc_feature (787)..(787): n is a, c, g, or t
  misc_feature (789)..(789): n is a, c, g, or t
  misc_feature (805)..(805): n is a, c, g, or t
  misc_feature (807)..(807): n is a, c, g, or t
  misc_feature (815)..(815): n is a, c, g, or t
  misc_feature (825)..(825): n is a, c, g, or t
  misc_feature (841)..(842): n is a, c, g, or t
  misc_feature (844)..(844): n is a, c, g, or t
  misc_feature (848)..(848): n is a, c, g, or t
  misc_feature (865)..(866): n is a, c, g, or t
  misc_feature (873)..(876): n is a, c, g, or t
  misc_feature (879)..(879): n is a, c, g, or t
  misc_feature (887)..(887): n is a, c, g, or t
  misc_feature (891)..(891): n is a, c, g, or t
  misc_feature (911)..(911): n is a, c, g, or t
  misc_feature (922)..(922): n is a, c, g, or t
  misc_feature (934)..(934): n is a, c, g, or t
  misc_feature (940)..(940): n is a, c, g, or t
  misc_feature (944)..(944): n is a, c, g, or t
  misc_feature (947)..(948): n is a, c, g, or t
  misc_feature (959)..(959): n is a, c, g, or t
  misc_feature (961)..(961): n is a, c, g, or t
  misc_feature (965)..(965): n is a, c, g, or t
  misc_feature (967)..(968): n is a, c, g, or t
  misc_feature (973)..(973): n is a, c, g, or t
  misc_feature (979)..(979): n is a, c, g, or t
  misc_feature (984)..(985): n is a, c, g, or t
  misc_feature (988)..(988): n is a, c, g, or t
  misc_feature (1000)..(1002): n is a, c, g, or t
  misc_feature (1008)..(1008): n is a, c, g, or t
  misc_feature (1013)..(1013): n is a, c, g, or t
  misc_feature (1023)..(1023): n is a, c, g, or t
  misc_feature (1036)..(1036): n is a, c, g, or t
  misc_feature (1040)..(1040): n is a, c, g, or t
  misc_feature (1042)..(1042): n is a, c, g, or t
  misc_feature (1045)..(1045): n is a, c, g, or t
  misc_feature (1063)..(1063): n is a, c, g, or t
  misc_feature (1067)..(1067): n is a, c, g, or t
  misc_feature (1069)..(1069): n is a, c, g, or t
  misc_feature (1075)..(1075): n is a, c, g, or t
  misc_feature (1079)..(1079): n is a, c, g, or t
  misc_feature (1082)..(1082): n is a, c, g, or t
  misc_feature (1094)..(1094): n is a, c, g, or t
  misc_feature (1096)..(1096): n is a, c, g, or t
  misc_feature (1100)..(1100): n is a, c, g, or t
  misc_feature (1103)..(1103): n is a, c, g, or t
  misc_feature (1106)..(1107): n is a, c, g, or t
  misc_feature (1112)..(1112): n is a, c, g, or t
  misc_feature (1115)..(1115): n is a, c, g, or t
  misc_feature (1117)..(1118): n is a, c, g, or t
  misc_feature (1125)..(1125): n is a, c, g, or t
  misc_feature (1129)..(1129): n is a, c, g, or t
  misc_feature (1132)..(1133): n is a, c, g, or t
  misc_feature (1135)..(1136): n is a, c, g, or t
  misc_feature (1140)..(1141): n is a, c, g, or t
  misc_feature (1143)..(1143): n is a, c, g, or t
  misc_feature (1146)..(1146): n is a, c, g, or t
  misc_feature (1150)..(1151): n is a, c, g, or t
  misc_feature (1153)..(1153): n is a, c, g, or t
  misc_feature (1158)..(1159): n is a, c, g, or t
  misc_feature (1169)..(1169): n is a, c, g, or t
  misc_feature (1174)..(1174): n is a, c, g, or t
  misc_feature (1176)..(1176): n is a, c, g, or t
  misc_feature (1184)..(1184): n is a, c, g, or t
  misc_feature (1187)..(1187): n is a, c, g, or t
  misc_feature (1191)..(1191): n is a, c, g, or t
  misc_feature (1193)..(1193): n is a, c, g, or t
  misc_feature (1196)..(1197): n is a, c, g, or t
  misc_feature (1199)..(1201): n is a, c, g, or t
  misc_feature (1204)..(1204): n is a, c, g, or t
  misc_feature (1211)..(1211): n is a, c, g, or t
  misc_feature (1215)..(1215): n is a, c, g, or t
  misc_feature (1219)..(1219): n is a, c, g, or t
  misc_feature (1223)..(1223): n is a, c, g, or t
  misc_feature (1226)..(1226): n is a, c, g, or t
  misc_feature (1231)..(1231): n is a, c, g, or t
  misc_feature (1233)..(1234): n is a, c, g, or t
  misc_feature (1236)..(1237): n is a, c, g, or t
  misc_feature (1239)..(1239): n is a, c, g, or t
  misc_feature (1246)..(1247): n is a, c, g, or t
  misc_feature (1251)..(1251): n is a, c, g, or t
agaaattactatgagaggatcgcatcaccattcaccatcacggatcctatttaggtgacactatagaatcgtcgacccacgcgtccgggaggagtgcggcgaggtttccactgttcactttcccgtggaaggttcaggaancnacttcgcttgttatcangggcccttcctcggatgtggagaaggccaagaancatctcctgcntctggnnnangataagcaaaacaagagtttcactgttganatccgcgcnaaggcagaataccnnaaattcctcatcggcaaggngggcggnaaaattctnnangtgcgcganngnnctggagcangngtnatcttcgctgcngctgangacaaggaccaggacctgatcacnattattngaaaggangangccgtccaanaggcacaaaaagagctggangncttgatcctnnacctgnatantgtggtggaanactccatgctggtggaccccaancaccnncnncanttcgtcatccgcaaaggccatttcttgcntganattgnngaagantatgntggngngatggtcatcttcccacgctctgncanncagagcgactnantcgccctcaagggcgccaagnactgtgtggangcngccaaanntcgcattcaggatatcattgaggacctggaagctcaggtgacnttanaatgtgctataccccagaaattccatcgatctgtnatgggccccagaggttccagaatccaantgattactcggnanttcagtgttctnattaaattcccnnaccnanaggagaacgcaattcncngtacctanccagttgtcnatgaaaatgttgactnntntggnaatggaaaaaaggctanncattgtnnnnccnggctctcntagnaggtgtgaaatcatcttcanttctggccagnaaagaaaaaatntgaagntgcnaannaaagctctggngncatngnnttccnggtccncattnnaantaaaagggtgcnnntttganctttnacttttaaantttatttggacanaaangnaantgggaatcccccaaaaangaangnatgaantttnaangggaaaaattcntntttnccnggnnccttnaantnnaattttnaaanttnntnncccnntnaangggnncnccccnngaaaattttngaaananggcccaanggnttgnanttnncnnnaanccggttnaaanaatnttcnggnccaancnngnntncccgggnntttnaaa

SEQ ID NO: 310 - DNA, 256 bp, Homo Sapiens
  misc_feature (4)..(4): n is a, c, g, or t
  misc_feature (17)..(17): n is a, c, g, or t
  misc_feature (20)..(21): n is a, c, g, or t
  misc_feature (37)..(37): n is a, c, g, or t
  misc_feature (41)..(41): n is a, c, g, or t
tatnaagaggagaaatnacnntgagaggatcgatacntacntacggatcctatttaggtgacactatagaatcgtcgacccacgcgtccgaccagctgcagactttctcagaggagcatcctgtgctcctaactgaggcgcctttaaacccacgaaaaaaccgggaacgagctgccgaagttttcttcgagaccttcaatgtgcccgctcttttcatctccatgcaagctgtactcagcctttacgctacaggcag

SEQ ID NO: 311 - DNA, 256 bp, Homo Sapiens
tagagaaattactatgagaggatcgcatcaccatcaccatcacggatcctatttaggtgacactatagaatcgtcgacccacgcgtccgcacttcagatggatggacacatactggattcaaagagatatgccgttattggagcagatctccgagacctgtctgaactggaagagaagctaaagaaatgtaacatgaatacacaattgccaacactcctgatagctgaatgtgtgctggtttacatgactccagag

SEQ ID NO: 312 - DNA, 256 bp, Homo Sapiens
  misc_feature (1)..(1): n is a, c, g, or t
  misc_feature (3)..(3): n is a, c, g, or t
nanctatgagaggatcgcatcaccatcaccatcacggatcctatttaggtgacactatagaatcgtcgacccacgcgtccgagacagtgcagccgctgcccaaaggggaccaagtgctgaacttctctgatgcagaggacctgattgatgacagtaagctcaaggacatgcgagatgaggtcctggaacatgagctgatggtggctgaccggcgccagaagcgagagattcggcagctggaacaggaactgcataa

SEQ ID NO: 313 - DNA, 1352 bp, Homo Sapiens
  misc_feature (1)..(2): n is a, c, g, or t
  misc_feature (4)..(4): n is a, c, g, or t
  misc_feature (692)..(692): n is a, c, g, or t
  misc_feature (855)..(855): n is a, c, g, or t
  misc_feature (867)..(867): n is a, c, g, or t
  misc_feature (900)..(900): n is a, c, g, or t
  misc_feature (902)..(902): n is a, c, g, or t
  misc_feature (920)..(920): n is a, c, g, or t
  misc_feature (926)..(926): n is a, c, g, or t
  misc_feature (938)..(938): n is a, c, g, or t
  misc_feature (944)..(944): n is a, c, g, or t
  misc_feature (953)..(953): n is a, c, g, or t
  misc_feature (986)..(986): n is a, c, g, or t
  misc_feature (1015)..(1015): n is a, c, g, or t
  misc_feature (1035)..(1036): n is a, c, g, or t
  misc_feature (1043)..(1043): n is a, c, g, or t
  misc_feature (1061)..(1061): n is a, c, g, or t
  misc_feature (1068)..(1068): n is a, c, g, or t
  misc_feature (1071)..(1071): n is a, c, g, or t
  misc_feature (1073)..(1073): n is a, c, g, or t
  misc_feature (1082)..(1083): n is a, c, g, or t
  misc_feature (1099)..(1099): n is a, c, g, or t
  misc_feature (1102)..(1102): n is a, c, g, or t
  misc_feature (1106)..(1106): n is a, c, g, or t
  misc_feature (1112)..(1112): n is a, c, g, or t
  misc_feature (1125)..(1125): n is a, c, g, or t
  misc_feature (1131)..(1131): n is a, c, g, or t
  misc_feature (1135)..(1136): n is a, c, g, or t
  misc_feature (1138)..(1138): n is a, c, g, or t
  misc_feature (1141)..(1141): n is a, c, g, or t
  misc_feature (1147)..(1148): n is a, c, g, or t
  misc_feature (1150)..(1151): n is a, c, g, or t
  misc_feature (1155)..(1155): n is a, c, g, or t
  misc_feature (1160)..(1160): n is a, c, g, or t
  misc_feature (1181)..(1181): n is a, c, g, or t
  misc_feature (1184)..(1184): n is a, c, g, or t
  misc_feature (1187)..(1189): n is a, c, g, or t
  misc_feature (1192)..(1192): n is a, c, g, or t
  misc_feature (1197)..(1197): n is a, c, g, or t
  misc_feature (1199)..(1199): n is a, c, g, or t
  misc_feature (1202)..(1202): n is a, c, g, or t
  misc_feature (1204)..(1204): n is a, c, g, or t
  misc_feature (1213)..(1213): n is a, c, g, or t
  misc_feature (1224)..(1224): n is a, c, g, or t
  misc_feature (1227)..(1227): n is a, c, g, or t
  misc_feature (1242)..(1242): n is a, c, g, or t
  misc_feature (1252)..(1252): n is a, c, g, or t
  misc_feature (1257)..(1257): n is a, c, g, or t
  misc_feature (1264)..(1264): n is a, c, g, or t
  misc_feature (1272)..(1272): n is a, c, g, or t
  misc_feature (1282)..(1282): n is a, c, g, or t
  misc_feature (1285)..(1285): n is a, c, g, or t
  misc_feature (1289)..(1289): n is a, c, g, or t
  misc_feature (1291)..(1292): n is a, c, g, or t
  misc_feature (1296)..(1298): n is a, c, g, or t
  misc_feature (1302)..(1302): n is a, c, g, or t
  misc_feature (1308)..(1308): n is a, c, g, or t
  misc_feature (1314)..(1314): n is a, c, g, or t
  misc_feature (1320)..(1321): n is a, c, g, or t
  misc_feature (1326)..(1326): n is a, c, g, or t
  misc_feature (1331)..(1339): n is a, c, g, or t
  misc_feature (1344)..(1344): n is a, c, g, or t
  misc_feature (1346)..(1346): n is a, c, g, or t
  misc_feature (1352)..(1352): n is a, c, g, or t
nnantagagaaattactatgagaggatcgcatcaccatcaccatcacggatcctatttaggtgacactatagaatcgtcgacccacgcgtccgcggacgcgtgggcgccgttcagtcgccaatatgcagctctttgtccgcgcccaggagctacacaccttcgaggtgaccggccaggaaacggtcgcccagatcaaggctcatgtagcctcactggagggcattgccccggaagatcaagtcgtgctcctggcaggcgcgcccctggaggatgaggccactctgggccagtgcggggtggaggccctgactaccctggaagtagcaggccgcatgcttggaggtaaagtccatggttccctggcccgtgctggaaaagtgagaggtcagactcctaaggtggccaaacaggagaagaagaagaagaagacaggtcgggctaagcggcggatgcagtacaaccggcgctttgtcaacgttgtgcccacctttggcaagaagaagggccccaatgccaactcttaagtcttttgtaattctggctttctctaataaaaaagccacttagttcagtcaaaaaaaaaaaaaaaaaaaaaaaaaaaaaaaaagggcggccgctccctatagtgagtcgtattaagcttaattagctgagcttggactcctgttgatagatccagtaatgacctcanaactccatctggatttgttcaaaacgctcggttgccgccgggcgttttttattggtgagaatccaagctagcttggcgagattttcaggagctaaggaagctaaaatggaaaaaaaaatcactggatataccaccgttgatatatcccaatggcatcgtaaanaacattttgagncatttcagtcagttgctcaatgtacctataacnanaccgttcagctggatatnacggcntttttaaaaacngtaaanaaaaataancacaagttttatccggcctttattcccattctngccccccctgaagaatgctcatccggaanttcctatggcaatgaaaaannggggaanctggggaaatgggaaaantgttccnccntngttaacccnnttttccatgaacaaantgnaaangttttnctcccctctgganggaaancccnnanaanttccgnnanntttntaaanaaaatttcccaaaaatggggnggnttnnnggnaaaancntgncntttttcccnaaaagggtttnttnaaaaaattttttttncccccccccnccccngggggantttccccntttttttttnaangggncnnaaannnaaantttttncccccntttttnnggggnaaaannnnnnnnnggggnanggggtn

SEQ ID NO: 314 - DNA, 256 bp, Homo Sapiens
  misc_feature (3)..(4): n is a, c, g, or t
ttnnctatgagaggatcgcatcaccatcaccatcacggatcctatttaggtgacactatagaatcgtcgacccacgcgtccgcaaagataaaatacagacagactactcaggatgcccctgaagaggttcgtaaccgtgacttcaggagagagttggaagaaagagagagagctgctgcaagagagaaaaatagggatcgtccaacccgagaacatacaacctcctcttcagtgtcaaaaaagccacggttagacc

SEQ ID NO: 315 - DNA, 1281 bp, Homo Sapiens
  misc_feature (1)..(1): n is a, c, g, or t
  misc_feature (193)..(193): n is a, c, g, or t
  misc_feature (674)..(674): n is a, c, g, or t
  misc_feature (718)..(718): n is a, c, g, or t
  misc_feature (749)..(749): n is a, c, g, or t
  misc_feature (758)..(758): n is a, c, g, or t
  misc_feature (779)..(779): n is a, c, g, or t
  misc_feature (781)..(781): n is a, c, g, or t
  misc_feature (845)..(845): n is a, c, g, or t
  misc_feature (851)..(851): n is a, c, g, or t
  misc_feature (863)..(863): n is a, c, g, or t
  misc_feature (878)..(878): n is a, c, g, or t
  misc_feature (912)..(912): n is a, c, g, or t
  misc_feature (918)..(918): n is a, c, g, or t
  misc_feature (956)..(956): n is a, c, g, or t
  misc_feature (984)..(984): n is a, c, g, or t
  misc_feature (987)..(987): n is a, c, g, or t
  misc_feature (997)..(997): n is a, c, g, or t
  misc_feature (1005)..(1005): n is a, c, g, or t
  misc_feature (1030)..(1030): n is a, c, g, or t
  misc_feature (1037)..(1037): n is a, c, g, or t
  misc_feature (1048)..(1048): n is a, c, g, or t
  misc_feature (1052)..(1052): n is a, c, g, or t
  misc_feature (1055)..(1055): n is a, c, g, or t
  misc_feature (1060)..(1060): n is a, c, g, or t
  misc_feature (1063)..(1063): n is a, c, g, or t
  misc_feature (1079)..(1079): n is a, c, g, or t
  misc_feature (1088)..(1088): n is a, c, g, or t
  misc_feature (1103)..(1104): n is a, c, g, or t
  misc_feature (1109)..(1109): n is a, c, g, or t
  misc_feature (1114)..(1114): n is a, c, g, or t
  misc_feature (1121)..(1121): n is a, c, g, or t
  misc_feature (1125)..(1125): n is a, c, g, or t
  misc_feature (1137)..(1139): n is a, c, g, or t
  misc_feature (1141)..(1141): n is a, c, g, or t
  misc_feature (1145)..(1145): n is a, c, g, or t
  misc_feature (1151)..(1151): n is a, c, g, or t
  misc_feature (1155)..(1156): n is a, c, g, or t
  misc_feature (1164)..(1164): n is a, c, g, or t
  misc_feature (1175)..(1175): n is a, c, g, or t
  misc_feature (1179)..(1179): n is a, c, g, or t
  misc_feature (1193)..(1193): n is a, c, g, or t
  misc_feature (1204)..(1205): n is a, c, g, or t
  misc_feature (1208)..(1208): n is a, c, g, or t
  misc_feature (1211)..(1213): n is a, c, g, or t
  misc_feature (1218)..(1218): n is a, c, g, or t
  misc_feature (1227)..(1227): n is a, c, g, or t
  misc_feature (1229)..(1229): n is a, c, g, or t
  misc_feature (1240)..(1240): n is a, c, g, or t
  misc_feature (1249)..(1249): n is a, c, g, or t
  misc_feature (1263)..(1263): n is a, c, g, or t
  misc_feature (1274)..(1274): n is a, c, g, or t
  misc_feature (1277)..(1277): n is a, c, g, or t
  misc_feature (1280)..(1280): n is a, c, g, or t
naattagagaaattactatgagaggatcgcatcaccatcaccatcacggatcctatttaggtgacactatagaatcgtcgacccacgcgttccgcccacgcgttccgacaaagcctccttcgctactccgtatgggtacgccatggagaccgccaagcagaaggccctggaggtggccaaccggctgtaccanaaagacctgcgggcccccgacgtggtcattggagcggacacgatcgtgacggtcggggggctgattctggagaagccggtggacaagcaggacgcctacaggatgctgtcccggttgagtgggagagaacacagcgtgttcacaggtgtcgcgatcgtccactgctccagcaaagaccatcagctggacaccagggtctcggaattctacgaggaaacgaaggtgaagttctcggagctgtccgaggagctgctctgggaatacgtccacagcggggagcccatggacaaagctggcggctacgggatccaggccctgggcggcatgctggtggagtccgtacacggggactttctgaacgtggtgggattcccgctgaaccacttctgcaagcagctggtgaagctctactacccgccccgcccggaggacctgcggcggagtgtcaagcacgactccatcccggccgcggacaccttcnaagacctcagtgacgtggaggggggtggctcgaagcccactcanagggacgcgggcagccgcgatgaaaaggccnaggcggaanaggcgggacaggccacggcanangctgagtgtcacaggactcgggaaaaccctgcctccgttcccgacacgcctcctggagctgatngagggntttatgctatcnaagggcctgctcacngcttgcaaactgaaggtgttcgatttgttaaaanaagaancccccccaaaaggctgcggatattgcccaacaaagtgnacccctcttgcttgtgaaatggaaaggnttntggaaatttntgctgccntggggctcctggaaaaaaaaaaacnaggtttnctttaaccaanaaancgngaaanttnttcctggcttcggaangggaaattntttttggccggtttnntttgnaaaanatgaccnccgngaaaccttttannngngggnttcccnccgnnagaaaaanccccccccccngggnttgggaaaaagggnaaattttttcnnttnttnnnccaanccgaaaccngntaatttttggncccttccgntaaaaaataatgtncgggggccgcnttnttnt

SEQ ID NO: 316 - DNA, 1320 bp, Homo Sapiens
  misc_feature (1)..(1): n is a, c, g, or t
  misc_feature (3)..(3): n is a, c, g, or t
  misc_feature (794)..(794): n is a, c, g, or t
  misc_feature (901)..(901): n is a, c, g, or t
  misc_feature (912)..(912): n is a, c, g, or t
  misc_feature (926)..(926): n is a, c, g, or t
  misc_feature (952)..(952): n is a, c, g, or t
  misc_feature (957)..(957): n is a, c, g, or t
  misc_feature (962)..(962): n is a, c, g, or t
  misc_feature (967)..(967): n is a, c, g, or t
  misc_feature (1017)..(1017): n is a, c, g, or t
  misc_feature (1024)..(1024): n is a, c, g, or t
  misc_feature (1029)..(1029): n is a, c, g, or t
  misc_feature (1050)..(1051): n is a, c, g, or t
  misc_feature (1073)..(1073): n is a, c, g, or t
  misc_feature (1079)..(1079): n is a, c, g, or t
  misc_feature (1094)..(1094): n is a, c, g, or t
  misc_feature (1096)..(1096): n is a, c, g, or t
  misc_feature (1101)..(1101): n is a, c, g, or t
  misc_feature (1112)..(1112): n is a, c, g, or t
  misc_feature (1115)..(1115): n is a, c, g, or t
  misc_feature (1127)..(1127): n is a, c, g, or t
  misc_feature (1144)..(1144): n is a, c, g, or t
  misc_feature (1147)..(1147): n is a, c, g, or t
  misc_feature (1150)..(1151): n is a, c, g, or t
  misc_feature (1153)..(1154): n is a, c, g, or t
  misc_feature (1156)..(1156): n is a, c, g, or t
  misc_feature (1160)..(1160): n is a, c, g, or t
  misc_feature (1165)..(1165): n is a, c, g, or t
  misc_feature (1171)..(1171): n is a, c, g, or t
  misc_feature (1178)..(1178): n is a, c, g, or t
  misc_feature (1183)..(1183): n is a, c, g, or t
  misc_feature (1185)..(1185): n is a, c, g, or t
  misc_feature (1188)..(1189): n is a, c, g, or t
  misc_feature (1191)..(1191): n is a, c, g, or t
  misc_feature (1201)..(1201): n is a, c, g, or t
  misc_feature (1207)..(1207): n is a, c, g, or t
  misc_feature (1214)..(1214): n is a, c, g, or t
  misc_feature (1218)..(1218): n is a, c, g, or t
  misc_feature (1220)..(1220): n is a, c, g, or t
  misc_feature (1224)..(1224): n is a, c, g, or t
  misc_feature (1228)..(1229): n is a, c, g, or t
  misc_feature (1233)..(1233): n is a, c, g, or t
  misc_feature (1235)..(1235): n is a, c, g, or t
  misc_feature (1248)..(1248): n is a, c, g, or t
  misc_feature (1251)..(1251): n is a, c, g, or t
  misc_feature (1264)..(1264): n is a, c, g, or t
  misc_feature (1267)..(1267): n is a, c, g, or t
  misc_feature (1271)..(1271): n is a, c, g, or t
  misc_feature (1278)..(1278): n is a, c, g, or t
  misc_feature (1300)..(1300): n is a, c, g, or t
  misc_feature (1303)..(1303): n is a, c, g, or t
  misc_feature (1305)..(1305): n is a, c, g, or t
  misc_feature (1307)..(1307): n is a, c, g, or t
  misc_feature (1312)..(1314): n is a, c, g, or t
  misc_feature (1320)..(1320): n is a, c, g, or t
nantagagaaattactatgagaggatcgcatcaccatcaccatcacggatcctatttaggtgacactatagaatcgtcgacccacgcgtccgcacccacccggactcagagtctcctcagacaccgagatgcgggtcacggcaccccgaaccctcctcctgctgctctggggggccctggccctgaccgagacctgggccggctcccactccatgaggtatttctacaccgccatgtcccggcccggccgcggggagccccgcttcatcgcagtgggctacgtggacgacacgcagttcgtgaggttcgacagcgacgccgcgagtccgagagaggagccgcgggcgccgtggatagagcaggaggggccggagtattgggaccggaacacacagatctacaaggcccaggcacagactgaccgagagagcctgcggaacctgcgcggctactacaaccagagcgaggccgggtctcacacttggcagacgatgtatggctgcgacctggggccggacgggcgcctcctccgcgggcataaccagttagcctacgacggcaaggattacatcgccctgaacgaggacctgagctcctggaccgcggcggacaccgcggctcagatcacccagcgcaagtgggaggcggcccgtgtggcggagcagctgagagcctacctggagggcctgtgcgtggagtggctccgcagatacctggagaacgggaaggagacgctgcagcgcgcggaccccccaaagacacacgtgacccaccaccccatctctgaccatgangccaccctgaggtgctgggccctgggcttctaccctgcggagatcacactgacctggcagcgggatggcgaggaccaaactcaggacactgagcttgtggaaaccanaccagcagganatagaaccttccanaagtgggcagctgtggtggtgccttntgganaaaancaaanatacccatgccatgtaaagcatgaagggctgccaaacccctcaccctganatggganccatnttccagtcaccatccccatcnngggattgttgctggcctggctntctaanaattttggtcatcgnanctggntcctactgganttntaaaaaaaaaantcagtgaaaagaggaanttnttnngnngntcangaaantgccanggtttanttttntnaanntnaaactaaaantttttngagaaanaaananattntccnncccntngaaataaaacctnggntttttttaaaaanaangttnccccttnaaaggggggggaaaaccccccnttntnanccttnnnttattn

SEQ ID NO: 317 - DNA, 1374 bp, Homo Sapiens
  misc_feature (808)..(808): n is a, c, g, or t
  misc_feature (827)..(827): n is a, c, g, or t
  misc_feature (852)..(852): n is a, c, g, or t
  misc_feature (869)..(869): n is a, c, g, or t
  misc_feature (884)..(884): n is a, c, g, or t
  misc_feature (891)..(891): n is a, c, g, or t
  misc_feature (897)..(897): n is a, c, g, or t
  misc_feature (901)..(901): n is a, c, g, or t
  misc_feature (921)..(921): n is a, c, g, or t
  misc_feature (923)..(923): n is a, c, g, or t
  misc_feature (929)..(930): n is a, c, g, or t
  misc_feature (955)..(955): n is a, c, g, or t
  misc_feature (964)..(964): n is a, c, g, or t
  misc_feature (975)..(975): n is a, c, g, or t
  misc_feature (988)..(988): n is a, c, g, or t
  misc_feature (994)..(994): n is a, c, g, or t
  misc_feature (1000)..(1001): n is a, c, g, or t
  misc_feature (1003)..(1003): n is a, c, g, or t
  misc_feature (1016)..(1016): n is a, c, g, or t
  misc_feature (1026)..(1026): n is a, c, g, or t
  misc_feature (1028)..(1028): n is a, c, g, or t
  misc_feature (1032)..(1032): n is a, c, g, or t
  misc_feature (1034)..(1034): n is a, c, g, or t
  misc_feature (1040)..(1040): n is a, c, g, or t
  misc_feature (1049)..(1049): n is a, c, g, or t
  misc_feature (1072)..(1072): n is a, c, g, or t
  misc_feature (1110)..(1110): n is a, c, g, or t
  misc_feature (1115)..(1115): n is a, c, g, or t
  misc_feature (1119)..(1119): n is a, c, g, or t
  misc_feature (1131)..(1131): n is a, c, g, or t
  misc_feature (1164)..(1164): n is a, c, g, or t
  misc_feature (1167)..(1168): n is a, c, g, or t
  misc_feature (1170)..(1171): n is a, c, g, or t
  misc_feature (1173)..(1176): n is a, c, g, or t
  misc_feature (1178)..(1182): n is a, c, g, or t
  misc_feature (1184)..(1199): n is a, c, g, or t
  misc_feature (1204)..(1204): n is a, c, g, or t
  misc_feature (1206)..(1206): n is a, c, g, or t
  misc_feature (1215)..(1215): n is a, c, g, or t
  misc_feature (1221)..(1221): n is a, c, g, or t
  misc_feature (1225)..(1225): n is a, c, g, or t
  misc_feature (1227)..(1227): n is a, c, g, or t
  misc_feature (1231)..(1233): n is a, c, g, or t
  misc_feature (1236)..(1238): n is a, c, g, or t
  misc_feature (1240)..(1240): n is a, c, g, or t
  misc_feature (1245)..(1245): n is a, c, g, or t
  misc_feature (1253)..(1253): n is a, c, g, or t
  misc_feature (1257)..(1257): n is a, c, g, or t
  misc_feature (1260)..(1260): n is a, c, g, or t
  misc_feature (1268)..(1268): n is a, c, g, or t
  misc_feature (1275)..(1275): n is a, c, g, or t
  misc_feature (1282)..(1282): n is a, c, g, or t
  misc_feature (1284)..(1284): n is a, c, g, or t
  misc_feature (1301)..(1301): n is a, c, g, or t
  misc_feature (1308)..(1308): n is a, c, g, or t
  misc_feature (1315)..(1315): n is a, c, g, or t
  misc_feature (1317)..(1317): n is a, c, g, or t
  misc_feature (1319)..(1319): n is a, c, g, or t
  misc_feature (1321)..(1321): n is a, c, g, or t
  misc_feature (1327)..(1327): n is a, c, g, or t
  misc_feature (1338)..(1338): n is a, c, g, or t
  misc_feature (1340)..(1341): n is a, c, g, or t
  misc_feature (1343)..(1345): n is a, c, g, or t
  misc_feature (1348)..(1348): n is a, c, g, or t
  misc_feature (1367)..(1367): n is a, c, g, or t
  misc_feature (1374)..(1374): n is a, c, g, or t
tagagaaattactatgagaggatcgcatcaccatcaccatcacggatcctatttaggtgacactatagaatcgtcgacccacgcgtccggcaaaaaagatctgacagagtacttgtctcgatttggggaagttgtagactgcacaattaaaacagatccagtcactgggagatcaagaggatttggatttgtgcttttcaaagatgctgctagtgttgataaggttttggaactgaaagaacacaaactggatggcaaattgatagatcccaaaagggccaaagctttaaaagggaaagaacctcccaaaaaggtttttgtgggtggattgagcccggatacttctgaagaacaaattaaagaatattttggagcctttggagagattgaaaatattgaacttcccatggatacaaaaacaaatgaaagaagaggattttgttttatcacatatactgatgaagagccagtaaaaaaattgttagaaagcagataccatcaaattggttctgggaagtgtgaaatcaaagttgcacaacccaaagaggtatataggcagcaacagcaacaacaaaaaggtggaagaggtgctgcagctggtggacgaggtggtacgaggggtcgtggccgaggtcagggccaaaactggaaccaaggatttaataactattatgatcaaggatatggaaattacaatagtgcctatggtggtgatcaaaactatagtggctatggcggatatgattatactgggtataactatgggaactatggatatggacagggatatgcagactacagtggccancagagcacttatggcaagncatctcgagggggtggcaatcaccnaaaacaattaccagccntactaaaggaaaacnttggaanaaaacngggnggagatgttaaagtaacccntncttgcnngacgaccttgaaaaattggccctcnggtgaatcnaagaggaatanttttgtaaaaaanctttcntagggnncnaaaccccctttgnggcccactgntnaaancngcccantaagtttcnttggttttaccttggcccttgcnaacccggggtaagacccaaggggaattggttaaacccnttttnttgnaccattcccggnaaacccccaaaaaagccttcccttttgggaaanaannannannnnannnnnannnnnnnnnnnnnnnnggggncnccccccccnatgggncccnanaccnnnatnnncnacctnggccccgntgtnaanccccaaangccccanccccccngntttttcaaacccggtcnccggggnttttttngnanancccccntggggaatttngnncnnngcncatgggaaaaaccccgttnccccctn

SEQ ID NO: 318 - DNA, 1224 bp, Homo Sapiens
  misc_feature (946)..(946): n is a, c, g, or t
  misc_feature (954)..(955): n is a, c, g, or t
  misc_feature (975)..(975): n is a, c, g, or t
  misc_feature (987)..(987): n is a, c, g, or t
  misc_feature (998)..(998): n is a, c, g, or t
  misc_feature (1019)..(1019): n is a, c, g, or t
  misc_feature (1024)..(1024): n is a, c, g, or t
  misc_feature (1026)..(1026): n is a, c, g, or t
  misc_feature (1032)..(1032): n is a, c, g, or t
  misc_feature (1058)..(1058): n is a, c, g, or t
  misc_feature (1060)..(1060): n is a, c, g, or t
  misc_feature (1063)..(1064): n is a, c, g, or t
  misc_feature (1068)..(1069): n is a, c, g, or t
  misc_feature (1074)..(1074): n is a, c, g, or t
  misc_feature (1077)..(1077): n is a, c, g, or t
  misc_feature (1080)..(1080): n is a, c, g, or t
  misc_feature (1092)..(1092): n is a, c, g, or t
  misc_feature (1097)..(1097): n is a, c, g, or t
  misc_feature (1106)..(1106): n is a, c, g, or t
  misc_feature (1125)..(1125): n is a, c, g, or t
  misc_feature (1134)..(1135): n is a, c, g, or t
  misc_feature (1140)..(1140): n is a, c, g, or t
  misc_feature (1144)..(1144): n is a, c, g, or t
  misc_feature (1156)..(1156): n is a, c, g, or t
  misc_feature (1166)..(1166): n is a, c, g, or t
  misc_feature (1170)..(1170): n is a, c, g, or t
  misc_feature (1182)..(1182): n is a, c, g, or t
  misc_feature (1184)..(1184): n is a, c, g, or t
  misc_feature (1188)..(1190): n is a, c, g, or t
  misc_feature (1192)..(1192): n is a, c, g, or t
  misc_feature (1196)..(1196): n is a, c, g, or t
  misc_feature (1199)..(1199): n is a, c, g, or t
  misc_feature (1207)..(1207): n is a, c, g, or t
  misc_feature (1215)..(1215): n is a, c, g, or t
  misc_feature (1218)..(1218): n is a, c, g, or t
ttagagaaaattacttatgagaggatcgcatcaccatcaccatcacggatcctatttaggtgacactatagaatcgtcgacccacgcgtccggccaaattgaagatgccaggcgtgcagcggagccctccttagttggcttacctcagactatcagtggtgacagtgggggaatgtcagcagtttcagatgggagtagcagcagcctagcagcctctgcttctcttttcccgttgaaggtgctaccgctgacgacacccctggtggatggcgaggatgagagctcctctggtgcaagtgtggtagctattgacaacaaaatcgagcaagctatggatctagtgaaaagccatttgatgtatgcggtcagagaagaagtggaggtcctcaaagagcaaatcaaagaactaatagagaaaaattcccagctggagcaggagaacaatctgctgaagacactggccagtcctgagcagcttgcccagtttcaggcccagctgcagactggctccccccctgccaccacccagccacagggcaccacacagccccccgcccagccagcatcgcagggctcaggaccaaccgcatagctgcctatgcccccgcagaactggctgctgcgtgtgaactgaacagacggagaagatgtgctagggagaatctgcctccacagtcacccatttcattgctcgctgcgaaagagacgtgagactgacatatgccattatctcttttccagtattaaacactcatatgcttatggcttggagaaatttcttagttgggtgaattaaaggttaatccgagaattagcatggatataccgggacctcatgcagcttggcagatatctgagaaatggtttaattcatgctcaggagctgtgtgcctttccatcccttccggctccctacccctcacttccaagggttctctctctgctngcgcttanngtcctacatggggttgggancgatggagctcntcctggactcncctctctcctctcctcccccnggagnanttgaangggggtaaaaaaactaaatgaggggnanaannttcnntgtanaanttngaaactgtcccnaaatnttaaaaaanaatagtactgggccttttnttccaacannggggnaccnaactttgaaagngacaaatggngccnggtactgggacntngctnnntncccnganggggtttngcttttgnaanttggga

SEQ ID NO: 319 - DNA, 1357 bp, Homo Sapiens
  misc_feature (472)..(472): n is a, c, g, or t
  misc_feature (476)..(476): n is a, c, g, or t
  misc_feature (481)..(481): n is a, c, g, or t
  misc_feature (483)..(483): n is a, c, g, or t
  misc_feature (492)..(492): n is a, c, g, or t
  misc_feature (494)..(494): n is a, c, g, or t
  misc_feature (498)..(498): n is a, c, g, or t
  misc_feature (519)..(519): n is a, c, g, or t
  misc_feature (527)..(527): n is a, c, g, or t
  misc_feature (538)..(538): n is a, c, g, or t
  misc_feature (543)..(543): n is a, c, g, or t
  misc_feature (553)..(553): n is a, c, g, or t
  misc_feature (555)..(556): n is a, c, g, or t
  misc_feature (560)..(560): n is a, c, g, or t
  misc_feature (563)..(563): n is a, c, g, or t
  misc_feature (582)..(582): n is a, c, g, or t
  misc_feature (584)..(584): n is a, c, g, or t
  misc_feature (593)..(593): n is a, c, g, or t
  misc_feature (607)..(607): n is a, c, g, or t
  misc_feature (612)..(612): n is a, c, g, or t
  misc_feature (615)..(615): n is a, c, g, or t
  misc_feature (667)..(667): n is a, c, g, or t
  misc_feature (689)..(689): n is a, c, g, or t
  misc_feature (700)..(700): n is a, c, g, or t
  misc_feature (742)..(742): n is a, c, g, or t
  misc_feature (750)..(750): n is a, c, g, or t
  misc_feature (754)..(754): n is a, c, g, or t
  misc_feature (787)..(787): n is a, c, g, or t
  misc_feature (817)..(817): n is a, c, g, or t
  misc_feature (855)..(855): n is a, c, g, or t
  misc_feature (861)..(861): n is a, c, g, or t
  misc_feature (868)..(868): n is a, c, g, or t
  misc_feature (874)..(874): n is a, c, g, or t
  misc_feature (902)..(902): n is a, c, g, or t
  misc_feature (905)..(905): n is a, c, g, or t
  misc_feature (920)..(920): n is a, c, g, or t
  misc_feature (925)..(925): n is a, c, g, or t
  misc_feature (936)..(936): n is a, c, g, or t
  misc_feature (942)..(943): n is a, c, g, or t
  misc_feature (955)..(955): n is a, c, g, or t
  misc_feature (979)..(979): n is a, c, g, or t
  misc_feature (984)..(984): n is a, c, g, or t
  misc_feature (989)..(990): n is a, c, g, or t
  misc_feature (1004)..(1004): n is a, c, g, or t
  misc_feature (1006)..(1006): n is a, c, g, or t
  misc_feature (1010)..(1010): n is a, c, g, or t
  misc_feature (1012)..(1012): n is a, c, g, or t
  misc_feature (1016)..(1016): n is a, c, g, or t
  misc_feature (1021)..(1021): n is a, c, g, or t
  misc_feature (1024)..(1024): n is a, c, g, or t
  misc_feature (1027)..(1027): n is a, c, g, or t
  misc_feature (1032)..(1032): n is a, c, g, or t
  misc_feature (1035)..(1035): n is a, c, g, or t
  misc_feature (1066)..(1066): n is a, c, g, or t
  misc_feature (1073)..(1073): n is a, c, g, or t
  misc_feature (1080)..(1081): n is a, c, g, or t
  misc_feature (1084)..(1084): n is a, c, g, or t
  misc_feature (1087)..(1087): n is a, c, g, or t
  misc_feature (1093)..(1093): n is a, c, g, or t
  misc_feature (1097)..(1098): n is a, c, g, or t
  misc_feature (1101)..(1101): n is a, c, g, or t
  misc_feature (1132)..(1132): n is a, c, g, or t
  misc_feature (1134)..(1134): n is a, c, g, or t
  misc_feature (1143)..(1143): n is a, c, g, or t
  misc_feature (1146)..(1146): n is a, c, g, or t
  misc_feature (1164)..(1164): n is a, c, g, or t
  misc_feature (1169)..(1170): n is a, c, g, or t
  misc_feature (1176)..(1177): n is a, c, g, or t
  misc_feature (1184)..(1184): n is a, c, g, or t
  misc_feature (1186)..(1186): n is a, c, g, or t
  misc_feature (1193)..(1193): n is a, c, g, or t
  misc_feature (1197)..(1197): n is a, c, g, or t
  misc_feature (1205)..(1205): n is a, c, g, or t
  misc_feature (1220)..(1220): n is a, c, g, or t
  misc_feature (1225)..(1225): n is a, c, g, or t
  misc_feature (1236)..(1236): n is a, c, g, or t
  misc_feature (1242)..(1242): n is a, c, g, or t
  misc_feature (1246)..(1246): n is a, c, g, or t
  misc_feature (1251)..(1252): n is a, c, g, or t
  misc_feature (1256)..(1256): n is a, c, g, or t
  misc_feature (1258)..(1258): n is a, c, g, or t
  misc_feature (1261)..(1261): n is a, c, g, or t
  misc_feature (1265)..(1266): n is a, c, g, or t
  misc_feature (1268)..(1268): n is a, c, g, or t
  misc_feature (1271)..(1271): n is a, c, g, or t
  misc_feature (1278)..(1278): n is a, c, g, or t
  misc_feature (1281)..(1282): n is a, c, g, or t
  misc_feature (1286)..(1288): n is a, c, g, or t
  misc_feature (1291)..(1291): n is a, c, g, or t
  misc_feature (1293)..(1293): n is a, c, g, or t
  misc_feature (1298)..(1298): n is a, c, g, or t
  misc_feature (1304)..(1304): n is a, c, g, or t
  misc_feature (1310)..(1310): n is a, c, g, or t
  misc_feature (1315)..(1315): n is a, c, g, or t
  misc_feature (1322)..(1329): n is a, c, g, or t
  misc_feature (1334)..(1336): n is a, c, g, or t
  misc_feature (1341)..(1344): n is a, c, g, or t
  misc_feature (1348)..(1348): n is a, c, g, or t
  misc_feature (1350)..(1350): n is a, c, g, or t
  misc_feature (1354)..(1354): n is a, c, g, or t
  misc_feature (1357)..(1357): n is a, c, g, or t
tagagaaattactatgagaggatcgcatcaccatcaccatcacggatcctatttaggtgacactatagaatcgtcgacccacgcgtccgaaatcatgacccgagaggtgcagacaaatgacttgaaagaagtggtcaataaattgattccagacagcattggaaaagacatagaaaaggcttgccaatctatttatcctctccatgatgtcttcgttagaaaagtaaaaatgctgaagaagcccaagtttgaattgggaaagctcatggagcttcatggtgaaggcagtagttctggaaaagccactggggacgagacaggtgctaaagttgaacgagctgatggatatgaaccaccagtccaagaatctgtttaaagttcagacttcaaatagtggcaaataaaaagtgctatttgtgaaaaaaaaaaaaaaaaaaaaaaaaaaaaaaaaaaaaaaaaaaaaaaaaaaaangggnggccncnccctatagngngtcntattaagcttaattagctgancttggacncctgttgatanatccngtaatgaccncnnaacnccntctggatttgttcaaaacncncggttgccnccgggcgttttttnttggnganaatccaagctagcttggcgagattttcaggagctaaggaagctaaaatgganaaaaaaatccctggatataccnccgttgatatntcccaatggcatcgtaaagaacattttgaggcatttcagtcngttgctcnatgnacctataaccagaccgttcagctggatattacngcctttttaaagaccgtaaagaaaaataancccaagttttatccggccttttttcccattcttgcccncctgangaatgcncctccnggaatttcctatggcaatgaaaaacggngancctggggatatgggnaaaanggtcccccccntgttanncccgtttttccntgaaccaaactggaaacgtttttncctcnccccnnggagggaaaacccncnaacnantttnccggnggnttnccacnccntaattttcccccaaaaatgggggcggggttnccggggnaaaaccnnggnccntatttncccnnaanggggtttttttgggaaaaaatttttttttcncnccccccccnaancccccgggggggaatttnccccnntttttnnatttaancnggggccnaaangggaaaantttctcccccccccnttttncccccgggggnaaaatnttanccccnnggcnanaangggnntnaanccccccnggnnaatnnnggntnccccnggcccntttggnggggnctccccnnnnnnnnaaaannnttttnnnntttncncccnccn

SEQ ID NO: 320 - DNA, 256 bp, Homo Sapiens
  misc_feature (2)..(2): n is a, c, g, or t
  misc_feature (4)..(4): n is a, c, g, or t
  misc_feature (6)..(6): n is a, c, g, or t
tnananggagaattaactatgagaggatcgcatcaccatcaccatcacggatcctatttaggtgacactatagaatcgtcgacccacgcgtccgatggaatgctcctaaatgatcgcaaagtatttgttggacgatttaagtctcgtaaagaacgagaagctgaacttggagctagggcaaaagaattcaccaatgtttacatcaagaattttggagaagacatggatgatgagcgccttaaggatctctttggca

SEQ ID NO: 321 - DNA, 256 bp, Homo Sapiens
  misc_feature (2)..(2): n is a, c, g, or t
  misc_feature (4)..(5): n is a, c, g, or t
  misc_feature (11)..(14): n is a, c, g, or t
  misc_feature (17)..(17): n is a, c, g, or t
  misc_feature (19)..(21): n is a, c, g, or t
  misc_feature (30)..(31): n is a, c, g, or t
  misc_feature (34)..(34): n is a, c, g, or t
  misc_feature (38)..(38): n is a, c, g, or t
  misc_feature (40)..(42): n is a, c, g, or t
  misc_feature (44)..(44): n is a, c, g, or t
  misc_feature (46)..(46): n is a, c, g, or t
  misc_feature (49)..(49): n is a, c, g, or t
  misc_feature (51)..(51): n is a, c, g, or t
  misc_feature (54)..(54): n is a, c, g, or t
  misc_feature (58)..(58): n is a, c, g, or t
  misc_feature (67)..(67): n is a, c, g, or t
  misc_feature (69)..(70): n is a, c, g, or t
  misc_feature (74)..(74): n is a, c, g, or t
  misc_feature (79)..(80): n is a, c, g, or t
  misc_feature (86)..(86): n is a, c, g, or t
  misc_feature (89)..(89): n is a, c, g, or t
  misc_feature (99)..(100): n is a, c, g, or t
  misc_feature (106)..(106): n is a, c, g, or t
  misc_feature (111)..(111): n is a, c, g, or t
  misc_feature (117)..(117): n is a, c, g, or t
  misc_feature (120)..(120): n is a, c, g, or t
  misc_feature (123)..(123): n is a, c, g, or t
  misc_feature (130)..(130): n is a, c, g, or t
  misc_feature (133)..(134): n is a, c, g, or t
  misc_feature (136)..(136): n is a, c, g, or t
  misc_feature (143)..(144): n is a, c, g, or t
  misc_feature (149)..(149): n is a, c, g, or t
  misc_feature (154)..(154): n is a, c, g, or t
  misc_feature (165)..(165): n is a, c, g, or t
  misc_feature (169)..(169): n is a, c, g, or t
  misc_feature (172)..(175): n is a, c, g, or t
  misc_feature (178)..(178): n is a, c, g, or t
  misc_feature (181)..(182): n is a, c, g, or t
  misc_feature (191)..(193): n is a, c, g, or t
  misc_feature (197)..(198): n is a, c, g, or t
  misc_feature (210)..(212): n is a, c, g, or t
  misc_feature (217)..(217): n is a, c, g, or t
  misc_feature (220)..(220): n is a, c, g, or t
  misc_feature (223)..(223): n is a, c, g, or t
  misc_feature (225)..(225): n is a, c, g, or t
  misc_feature (236)..(236): n is a, c, g, or t
  misc_feature (250)..(251): n is a, c, g, or t
  misc_feature (253)..(253): n is a, c, g, or t
gncnntctttnnnnatnannncccgccccnnaanttanannngnanatnanttngggnggggggccngnncctnccctnnccaccnatncgcgtgagcnntttttnttttnaggggngcncanataatanaanngncgattcnnacccncaacngcgctctcgtnatgntgnnnnacnagnncagagcctnnngtcnnctcttattgtannngtccnctncancngcgtagcccantctatttcggactnnancaa

SEQ ID NO: 322 - DNA, 1437 bp, Homo Sapiens
  misc_feature (879)..(879): n is a, c, g, or t
  misc_feature (922)..(922): n is a, c, g, or t
  misc_feature (948)..(948): n is a, c, g, or t
  misc_feature (970)..(970): n is a, c, g, or t
  misc_feature (972)..(972): n is a, c, g, or t
  misc_feature (982)..(982): n is a, c, g, or t
  misc_feature (985)..(985): n is a, c, g, or t
  misc_feature (1013)..(1013): n is a, c, g, or t
  misc_feature (1023)..(1023): n is a, c, g, or t
  misc_feature (1030)..(1030): n is a, c, g, or t
  misc_feature (1045)..(1045): n is a, c, g, or t
  misc_feature (1052)..(1052): n is a, c, g, or t
  misc_feature (1055)..(1056): n is a, c, g, or t
  misc_feature (1058)..(1058): n is a, c, g, or t
  misc_feature (1069)..(1069): n is a, c, g, or t
  misc_feature (1104)..(1104): n is a, c, g, or t
  misc_feature (1115)..(1115): n is a, c, g, or t
  misc_feature (1118)..(1118): n is a, c, g, or t
  misc_feature (1122)..(1122): n is a, c, g, or t
  misc_feature (1127)..(1127): n is a, c, g, or t
  misc_feature (1129)..(1129): n is a, c, g, or t
  misc_feature (1135)..(1135): n is a, c, g, or t
  misc_feature (1143)..(1143): n is a, c, g, or t
  misc_feature (1145)..(1145): n is a, c, g, or t
  misc_feature (1152)..(1152): n is a, c, g, or t
  misc_feature (1157)..(1157): n is a, c, g, or t
  misc_feature (1170)..(1171): n is a, c, g, or t
  misc_feature (1175)..(1176): n is a, c, g, or t
  misc_feature (1178)..(1178): n is a, c, g, or t
  misc_feature (1184)..(1184): n is a, c, g, or t
  misc_feature (1192)..(1192): n is a, c, g, or t
  misc_feature (1203)..(1203): n is a, c, g, or t
  misc_feature (1206)..(1206): n is a, c, g, or t
  misc_feature (1213)..(1213): n is a, c, g, or t
  misc_feature (1226)..(1226): n is a, c, g, or t
  misc_feature (1253)..(1253): n is a, c, g, or t
  misc_feature (1255)..(1255): n is a, c, g, or t
  misc_feature (1257)..(1258): n is a, c, g, or t
  misc_feature (1261)..(1261): n is a, c, g, or t
  misc_feature (1263)..(1263): n is a, c, g, or t
  misc_feature (1265)..(1266): n is a, c, g, or t
  misc_feature (1283)..(1283): n is a, c, g, or t
  misc_feature (1290)..(1290): n is a, c, g, or t
  misc_feature (1299)..(1300): n is a, c, g, or t
  misc_feature (1303)..(1303): n is a, c, g, or t
  misc_feature (1319)..(1319): n is a, c, g, or t
  misc_feature (1322)..(1322): n is a, c, g, or t
  misc_feature (1325)..(1325): n is a, c, g, or t
  misc_feature (1327)..(1329): n is a, c, g, or t
  misc_feature (1336)..(1336): n is a, c, g, or t
  misc_feature (1342)..(1342): n is a, c, g, or t
  misc_feature (1350)..(1350): n is a, c, g, or t
  misc_feature (1363)..(1363): n is a, c, g, or t
  misc_feature (1379)..(1379): n is a, c, g, or t
  misc_feature (1381)..(1381): n is a, c, g, or t
  misc_feature (1384)..(1384): n is a, c, g, or t
  misc_feature (1391)..(1393): n is a, c, g, or t
  misc_feature (1395)..(1396): n is a, c, g, or t
  misc_feature (1401)..(1402): n is a, c, g, or t
  misc_feature (1404)..(1405): n is a, c, g, or t
  misc_feature (1413)..(1413): n is a, c, g, or t
  misc_feature (1423)..(1424): n is a, c, g, or t
  misc_feature (1429)..(1429): n is a, c, g, or t
  misc_feature (1435)..(1435): n is a, c, g, or t
agagagattactatgagaggatcgcatcaccatcaccatcacggatcctatttaggtgacactatagaatcgtcgacccacgcgtccgcggacctactgggctccatcctgagctccatggagaagccacccagcctcggtgaccaggagactcggcgcaaggcccgagaacaggccgcccgcctgaagaaactacaagagcaagagaaacaacagaaagtggagtttcgtaaaaggatggagaaggaggtgtcagatttcattcaagacagtgggcagatcaagaaaaagtttcagccaatgaacaagatcgagaggagcatactacatgatgtggtggaagtggctggcctgacatccttctcctttggggaagatgatgactgtcgctatgtcatgatcttcaaaaaggagtttgcaccctcagatgaagagctagactcttaccgtcgtggagaggaatgggacccccagaaggctgaggagaagcggaagctgaaggagctggcccagaggcaagaggaggaggcagcccagcaggggcctgtggtggtgagccctgccagcgactacaaggacaagtacagccacctcatcggcaagggagcagccaaagacgcagcccacatgctacaggccaataagacctacggctgtgtgcccgtggccaataagagggacacacgctccattgaagaggctatgaatgagatcagagccaagaagcgtctgcggcagagtggggaagagttgccgccaacctcctaggcgccccgcccagctccctttgacccctggggcagggcagggggcagggagagacaaggctgctgctattagagcccatcctggagccccacctctgaaccacctcctacnagctgtccctcaggctgggggaaaacaggtgtttgatttgtcnccgttggagcttggatatgtgcgtgncatgtgtgtgtgtgtgtgaaantntgaatgcccnggngggtatttatctgtattattccccgttntgggaatttncttcccntgggggctgggggtncttttanttnnanaattactgttnaccccaaaaaaaaaaaaaaaaaaaaaaaaaaaaangggggcccccnccntaanggggncnaataanctttttantngacttgnccccngttgaaaatcccnnatgnncnccaacnccctctgntttttcaaacnccnggttccnccggggttttttngggaaaccccctccttgggaatttttngncnnggncntnnggggaaaaacccggttncccgttntttcccggnnccnaaaaatttgggttttngtnctngnnnaaccacnctcggntttctttnaaaaaaaaaaaanttccttttttttcccngntcnccttttnnnannggggnngnntttttttntaaaattttnnaaaancctttngg

SEQ ID NO: 323 - DNA, 256 bp, Homo Sapiens
taagagaaaatactatgagaggatcgcatcaccatcaccatcacggatcctatttaggtgacactatagaatcgtcgacccacgcgtccggtttcgtggtaagtgaaggagcaaatactatggacattggacggactgtgcttcagaactaccttcctcgtcacaggcttgatgctggtactttcggaacaatgggagttggtttgggatttgctattgcagctgccgtggtggctaaagatagaagccctgggca

SEQ ID NO: 324 - DNA, 256 bp, Homo Sapiens
taagaggagaattaactatgagaggatcgcatcaccatcaccatcacggatcctatttaggtgacactatagaatcgtcgacccacgcgtccgcccacgcgtccgacggtgtggacactcacctgttcagcgtggagtcaccgcaggagctggctgcctggacccgccagcttgtggatggctgtcaccgggccgccgagggtgtgcaggaggtgtctacagcctgcacgtggaatgggcgtccctgcagcctgtc

SEQ ID NO: 325 - DNA, 1305 bp, Homo Sapiens
  misc_feature (1)..(1): n is a, c, g, or t
  misc_feature (836)..(836): n is a, c, g, or t
  misc_feature (838)..(838): n is a, c, g, or t
  misc_feature (843)..(843): n is a, c, g, or t
  misc_feature (864)..(864): n is a, c, g, or t
  misc_feature (871)..(871): n is a, c, g, or t
  misc_feature (874)..(874): n is a, c, g, or t
  misc_feature (878)..(878): n is a, c, g, or t
  misc_feature (880)..(880): n is a, c, g, or t
  misc_feature (921)..(921): n is a, c, g, or t
  misc_feature (930)..(930): n is a, c, g, or t
  misc_feature (943)..(943): n is a, c, g, or t
  misc_feature (966)..(966): n is a, c, g, or t
  misc_feature (973)..(974): n is a, c, g, or t
  misc_feature (977)..(977): n is a, c, g, or t
  misc_feature (981)..(981): n is a, c, g, or t
  misc_feature (997)..(997): n is a, c, g, or t
  misc_feature (1002)..(1002): n is a, c, g, or t
  misc_feature (1008)..(1008): n is a, c, g, or t
  misc_feature (1012)..(1013): n is a, c, g, or t
  misc_feature (1016)..(1018): n is a, c, g, or t
  misc_feature (1021)..(1021): n is a, c, g, or t
  misc_feature (1025)..(1025): n is a, c, g, or t
  misc_feature (1029)..(1029): n is a, c, g, or t
  misc_feature (1032)..(1033): n is a, c, g, or t
  misc_feature (1041)..(1041): n is a, c, g, or t
  misc_feature (1043)..(1044): n is a, c, g, or t
  misc_feature (1047)..(1047): n is a, c, g, or t
  misc_feature (1049)..(1050): n is a, c, g, or t
  misc_feature (1054)..(1056): n is a, c, g, or t
  misc_feature (1061)..(1062): n is a, c, g, or t
  misc_feature (1064)..(1066): n is a, c, g, or t
  misc_feature (1069)..(1074): n is a, c, g, or t
  misc_feature (1076)..(1076): n is a, c, g, or t
  misc_feature (1080)..(1080): n is a, c, g, or t
  misc_feature (1082)..(1084): n is a, c, g, or t
  misc_feature (1086)..(1088): n is a, c, g, or t
  misc_feature (1091)..(1092): n is a, c, g, or t
  misc_feature (1094)..(1096): n is a, c, g, or t
  misc_feature (1099)..(1100): n is a, c, g, or t
  misc_feature (1103)..(1104): n is a, c, g, or t
  misc_feature (1107)..(1107): n is a, c, g, or t
  misc_feature (1109)..(1109): n is a, c, g, or t
  misc_feature (1111)..(1115): n is a, c, g, or t
  misc_feature (1118)..(1118): n is a, c, g, or t
  misc_feature (1120)..(1121): n is a, c, g, or t
  misc_feature (1124)..(1124): n is a, c, g, or t
  misc_feature (1128)..(1133): n is a, c, g, or t
  misc_feature (1135)..(1135): n is a, c, g, or t
  misc_feature (1138)..(1141): n is a, c, g, or t
  misc_feature (1143)..(1160): n is a, c, g, or t
  misc_feature (1163)..(1180): n is a, c, g, or t
  misc_feature (1182)..(1203): n is a, c, g, or t
  misc_feature (1205)..(1206): n is a, c, g, or t
  misc_feature (1208)..(1220): n is a, c, g, or t
  misc_feature (1222)..(1246): n is a, c, g, or t
  misc_feature (1248)..(1305): n is a, c, g, or t
nttagagaaattactatgagaggatcgcatcaccatcaccatcacggatcctatttaggtgacactatagaatcgtcgacccacgcgtccgcccagcaacacgctcctgacttcccttcccaaggactcgacctgagaaccgccatgtactcggagatccagagggagcgggcagacattgggggcctgatggcccggccagaatacagagagtggaatccggagctcatcaagcccaagaagctgctgaaccccgtgaaggcctctcggagtcaccaggagctccaccgggagctgctcatgaaccacagaaggggccttggtgtggacagcaagccagagctgcagcgtgtcctagagcaccgccggcggaaccagctcatcaagaagaagaaggaggagctggaagccaagcggctgcagtgcccctttgagcaggagctgctgagacggcagcagaggctgaaccagctggaaaaaccaccagagaaggaagaggatcacgcccccgagtttattaaagtcagggaaaacctgcggagaattgccacactgaccagcgaagagagagagctgtagggccagctgccgggctcaggccactgcccaccctggcctggacagcctccttcagcccttctgtacctggcagccctgggccccaggccctgggacgtctgtgatgttcccacctgcttctgtagaaatgtgtcaccccagagggcctggctctccctgggaggctggggcccctaagctcctaggttttccttccaagcacccagccctcctgctccaagagggataacctgcacccctccctgcaaggggttcanancccancacaggagctttctctggcanaattgangangaanangtggccctctgacttgacaagccttctgttctgcccaggcnttccaccangaatctccgaggntcccagggcccgcttctccgtanaccccanntcntagntctcaaaaactccccncctgnggtttnctgnnccnnnaanttanttcnggnncctgcttnannccntnngggnnnaaggnngnnnaannnnnngncttntnnngnnnccnncnnnggnnggnnaananannnnnttngnnttncccnnnnnngnttnnnncnnnnnnnnnnnnnnnnnnttnnnnnnnnnnnnnnnnnntnnnnnnnnnnnnnnnnnnnnnntnntnnnnnnnnnnnnntnnnnnnnnnnnnnnnnnnnnnnnnntnnnnnnnnnnnnnnnnnnnnnnnnnnnnnnnnnnnnnnnnnnnnnnnnnnnnnnnnnn

SEQ ID NO: 326 - DNA, 1243 bp, Homo Sapiens
  misc_feature (13)..(13): n is a, c, g, or t
  misc_feature (923)..(923): n is a, c, g, or t
  misc_feature (940)..(940): n is a, c, g, or t
  misc_feature (952)..(956): n is a, c, g, or t
  misc_feature (959)..(970): n is a, c, g, or t
  misc_feature (972)..(1030): n is a, c, g, or t
  misc_feature (1032)..(1037): n is a, c, g, or t
  misc_feature (1044)..(1044): n is a, c, g, or t
  misc_feature (1063)..(1064): n is a, c, g, or t
  misc_feature (1069)..(1069): n is a, c, g, or t
  misc_feature (1075)..(1075): n is a, c, g, or t
  misc_feature (1078)..(1080): n is a, c, g, or t
  misc_feature (1083)..(1083): n is a, c, g, or t
  misc_feature (1088)..(1088): n is a, c, g, or t
  misc_feature (1108)..(1108): n is a, c, g, or t
  misc_feature (1110)..(1110): n is a, c, g, or t
  misc_feature (1116)..(1116): n is a, c, g, or t
  misc_feature (1122)..(1122): n is a, c, g, or t
  misc_feature (1124)..(1124): n is a, c, g, or t
  misc_feature (1130)..(1130): n is a, c, g, or t
  misc_feature (1136)..(1136): n is a, c, g, or t
  misc_feature (1140)..(1140): n is a, c, g, or t
  misc_feature (1147)..(1147): n is a, c, g, or t
  misc_feature (1149)..(1149): n is a, c, g, or t
  misc_feature (1171)..(1171): n is a, c, g, or t
  misc_feature (1183)..(1183): n is a, c, g, or t
  misc_feature (1189)..(1190): n is a, c, g, or t
  misc_feature (1196)..(1196): n is a, c, g, or t
  misc_feature (1199)..(1199): n is a, c, g, or t
  misc_feature (1205)..(1205): n is a, c, g, or t
  misc_feature (1208)..(1208): n is a, c, g, or t
  misc_feature (1214)..(1214): n is a, c, g, or t
  misc_feature (1217)..(1217): n is a, c, g, or t
  misc_feature (1222)..(1222): n is a, c, g, or t
  misc_feature (1227)..(1227): n is a, c, g, or t
  misc_feature (1242)..(1242): n is a, c, g, or t
tagagagaattanctatggagaggatcgcatcaccatcaccatcacggatcctatttaggtgacactatagaatcgtcgacccacgcgtccgcaggcatgccaccatctttttcaaagcccaatattgaaggtgccccaggggctcatattggaaataccttccagcatgtgcagtctttgccaacaaaaaaaattaccaagaaacctattccagatgagcacctcattctaaagaccacatttgaggatcttattcagcgctgcctttcttcagcaacagaccctcaaaccaagaggaagctagatgatgccagcaaacgtttggagtttctgtatgataaacttagggaacagacactttcaccaacaatcaccagtggtttacacaacattgcaaggagcattgaaactcgaaactactcagaaggattgaccatgcatacccacatagttagcaccagcaacttcagtgagacctctgctttcatgccagttctcaaagttgttctcacccaggccaataagctgggtgtctaaaaggacagcttctcttccactcaatattgccatttttccaaagaaacatgttaaaaaaaaaaattataagacatggactagtcctcattagcatgtttgcatagcaaccagtcaagagcatttacactatttctgctgatatactcaccttagaactgctcagaaccctggtgctttatttttgttttaatcttttgttgccagtgatgattttcctattctgcaaatagtgtatttcctggattacacatagtatggtttcctgaagtattctgataaatgtgttttttaaaacctcaatatactttttagaaaaggagcatctggttatgcataaagcaaagctaaaactaaatttctttcatgtcctccctacttcctcagngtcaatcagattaaagngtgtaatccttnnnnnaannnnnnnnnnnnannnnnnnnnnnnnnnnnnnnnnnnnnnnnnnnnnnnnnnnnnnnnnnnnnnnnnnnnnnannnnnnggggggngcccccccctaaggggggnnataanacttanttnnnggnctggnccccgggggaaaacccgaangncccccnaacccntnggtttnttcaancccnggtggcncnggggttttttttggggaaaacnccctcttggggnattttnngggctnggncctaanggnaaaaanccngggtnacccngtttatttcccgggnc

SEQ ID NO: 327 - DNA, 256 bp, Homo Sapiens
  misc_feature (2)..(2): n is a, c, g, or t
gngaattaactatgagaggatcgcatcaccatcaccatcacggatcctatttaggtgacactatagaatcgtcgacccacgcgtccggagatgaaaaagaattggacaaaagagaaaaagccaagaaattggacaaagagaatctcagtgatgaaagagccagtgggcaaagttgtacattgcccaagcgttctgatagcgaacttaaagatgaaaaaccaaagagacctgaagatgagagcggcagagactatag

SEQ ID NO: 328 - DNA, 256 bp, Homo Sapiens
  misc_feature (1)..(2): n is a, c, g, or t
  misc_feature (7)..(7): n is a, c, g, or t
  misc_feature (10)..(10): n is a, c, g, or t
  misc_feature (12)..(15): n is a, c, g, or t
  misc_feature (20)..(20): n is a, c, g, or t
  misc_feature (23)..(23): n is a, c, g, or t
  misc_feature (26)..(26): n is a, c, g, or t
  misc_feature (29)..(29): n is a, c, g, or t
  misc_feature (33)..(33): n is a, c, g, or t
  misc_feature (35)..(35): n is a, c, g, or t
  misc_feature (43)..(43): n is a, c, g, or t
  misc_feature (45)..(45): n is a, c, g, or t
  misc_feature (47)..(47): n is a, c, g, or t
  misc_feature (50)..(51): n is a, c, g, or t
  misc_feature (55)..(55): n is a, c, g, or t
  misc_feature (58)..(58): n is a, c, g, or t
  misc_feature (61)..(62): n is a, c, g, or t
  misc_feature (64)..(64): n is a, c, g, or t
  misc_feature (67)..(71): n is a, c, g, or t
  misc_feature (73)..(75): n is a, c, g, or t
  misc_feature (79)..(81): n is a, c, g, or t
  misc_feature (85)..(85): n is a, c, g, or t
  misc_feature (87)..(88): n is a, c, g, or t
  misc_feature (90)..(90): n is a, c, g, or t
  misc_feature (92)..(92): n is a, c, g, or t
  misc_feature (97)..(97): n is a, c, g, or t
  misc_feature (99)..(100): n is a, c, g, or t
  misc_feature (105)..(106): n is a, c, g, or t
  misc_feature (112)..(118): n is a, c, g, or t
  misc_feature (120)..(120): n is a, c, g, or t
  misc_feature (122)..(123): n is a, c, g, or t
  misc_feature (125)..(125): n is a, c, g, or t
  misc_feature (131)..(131): n is a, c, g, or t
  misc_feature (137)..(137): n is a, c, g, or t
  misc_feature (143)..(145): n is a, c, g, or t
  misc_feature (147)..(147): n is a, c, g, or t
  misc_feature (154)..(155): n is a, c, g, or t
  misc_feature (160)..(160): n is a, c, g, or t
  misc_feature (163)..(163): n is a, c, g, or t
  misc_feature (166)..(166): n is a, c, g, or t
  misc_feature (173)..(173): n is a, c, g, or t
  misc_feature (176)..(176): n is a, c, g, or t
  misc_feature (179)..(180): n is a, c, g, or t
  misc_feature (191)..(191): n is a, c, g, or t
  misc_feature (194)..(194): n is a, c, g, or t
  misc_feature (204)..(205): n is a, c, g, or t
  misc_feature (211)..(211): n is a, c, g, or t
  misc_feature (213)..(213): n is a, c, g, or t
  misc_feature (216)..(216): n is a, c, g, or t
  misc_feature (234)..(234): n is a, c, g, or t
  misc_feature (240)..(240): n is a, c, g, or t
  misc_feature (251)..(251): n is a, c, g, or t
  misc_feature (253)..(253): n is a, c, g, or t
nnattanatnannnnttaantgnaanttnattntngtttttgngngngcnngcgntcntcnncnctnnnnntnnnagcnnntcancnncntncggcncnnccctnncctttnnnnnnngncnngnctcganggaacncttttnnntntctgtgnntttcncgngtnttttcgnaanacnnagcaccgtttnctncttttttttnnttgttngngcnctttggttgtcttgtgtntttttnggtttgtttantnttt

SEQ ID NO: 329 - DNA, 1379 bp, Homo Sapiens
  misc_feature (204)..(204): n is a, c, g, or t
  misc_feature (804)..(804): n is a, c, g, or t
  misc_feature (812)..(812): n is a, c, g, or t
  misc_feature (848)..(848): n is a, c, g, or t
  misc_feature (869)..(869): n is a, c, g, or t
  misc_feature (878)..(878): n is a, c, g, or t
  misc_feature (887)..(887): n is a, c, g, or t
  misc_feature (899)..(899): n is a, c, g, or t
  misc_feature (913)..(914): n is a, c, g, or t
  misc_feature (927)..(927): n is a, c, g, or t
  misc_feature (935)..(935): n is a, c, g, or t
  misc_feature (949)..(949): n is a, c, g, or t
  misc_feature (953)..(953): n is a, c, g, or t
  misc_feature (955)..(955): n is a, c, g, or t
  misc_feature (962)..(962): n is a, c, g, or t
  misc_feature (974)..(974): n is a, c, g, or t
  misc_feature (976)..(977): n is a, c, g, or t
  misc_feature (992)..(992): n is a, c, g, or t
  misc_feature (997)..(997): n is a, c, g, or t
  misc_feature (999)..(999): n is a, c, g, or t
  misc_feature (1001)..(1001): n is a, c, g, or t
  misc_feature (1011)..(1011): n is a, c, g, or t
  misc_feature (1013)..(1013): n is a, c, g, or t
  misc_feature (1016)..(1016): n is a, c, g, or t
  misc_feature (1021)..(1021): n is a, c, g, or t
  misc_feature (1024)..(1024): n is a, c, g, or t
  misc_feature (1026)..(1026): n is a, c, g, or t
  misc_feature (1033)..(1033): n is a, c, g, or t
  misc_feature (1040)..(1040): n is a, c, g, or t
  misc_feature (1042)..(1042): n is a, c, g, or t
  misc_feature (1047)..(1047): n is a, c, g, or t
  misc_feature (1057)..(1057): n is a, c, g, or t
  misc_feature (1062)..(1062): n is a, c, g, or t
  misc_feature (1069)..(1069): n is a, c, g, or t
  misc_feature (1073)..(1073): n is a, c, g, or t
  misc_feature (1076)..(1076): n is a, c, g, or t
  misc_feature (1080)..(1081): n is a, c, g, or t
  misc_feature (1086)..(1086): n is a, c, g, or t
  misc_feature (1093)..(1093): n is a, c, g, or t
  misc_feature (1103)..(1103): n is a, c, g, or t
  misc_feature (1106)..(1107): n is a, c, g, or t
  misc_feature (1109)..(1109): n is a, c, g, or t
  misc_feature (1118)..(1118): n is a, c, g, or t
  misc_feature (1123)..(1123): n is a, c, g, or t
  misc_feature (1126)..(1126): n is a, c, g, or t
  misc_feature (1135)..(1136): n is a, c, g, or t
  misc_feature (1139)..(1140): n is a, c, g, or t
  misc_feature (1144)..(1145): n is a, c, g, or t
  misc_feature (1150)..(1150): n is a, c, g, or t
  misc_feature (1158)..(1158): n is a, c, g, or t
  misc_feature (1162)..(1162): n is a, c, g, or t
  misc_feature (1170)..(1171): n is a, c, g, or t
  misc_feature (1173)..(1173): n is a, c, g, or t
  misc_feature (1182)..(1182): n is a, c, g, or t
  misc_feature (1186)..(1186): n is a, c, g, or t
  misc_feature (1194)..(1194): n is a, c, g, or t
  misc_feature (1202)..(1202): n is a, c, g, or t
  misc_feature (1209)..(1209): n is a, c, g, or t
  misc_feature (1215)..(1215): n is a, c, g, or t
  misc_feature (1222)..(1222): n is a, c, g, or t
  misc_feature (1227)..(1228): n is a, c, g, or t
  misc_feature (1232)..(1232): n is a, c, g, or t
  misc_feature (1241)..(1244): n is a, c, g, or t
  misc_feature (1246)..(1246): n is a, c, g, or t
  misc_feature (1254)..(1254): n is a, c, g, or t
  misc_feature (1258)..(1258): n is a, c, g, or t
  misc_feature (1267)..(1267): n is a, c, g, or t
  misc_feature (1275)..(1275): n is a, c, g, or t
  misc_feature (1277)..(1277): n is a, c, g, or t
  misc_feature (1281)..(1282): n is a, c, g, or t
  misc_feature (1292)..(1292): n is a, c, g, or t
  misc_feature (1295)..(1295): n is a, c, g, or t
  misc_feature (1308)..(1308): n is a, c, g, or t
  misc_feature (1310)..(1310): n is a, c, g, or t
  misc_feature (1324)..(1324): n is a, c, g, or t
  misc_feature (1331)..(1332): n is a, c, g, or t
  misc_feature (1340)..(1340): n is a, c, g, or t
  misc_feature (1344)..(1345): n is a, c, g, or t
  misc_feature (1353)..(1353): n is a, c, g, or t
  misc_feature (1360)..(1360): n is a, c, g, or t
  misc_feature (1363)..(1363): n is a, c, g, or t
  misc_feature (1365)..(1365): n is a, c, g, or t
  misc_feature (1368)..(1368): n is a, c, g, or t
  misc_feature (1371)..(1371): n is a, c, g, or t
agagaaattactatgagaggatcgcatcaccatcaccatcacggatcctatttaggtgacactatagaatcgtcgacccacgcgtccgcccacgcgtccgcccacgcgtccgcccacgcgtccgcggcagcggcggcggcggctgcagaacagcaaagttccaatggtcctgtaaagaagtccatgcgtgagaaggctgttganagaaggagtgtcaataaagagcacaacagtaactttaaagctggatacattccgattgatgaagatcgtctccacaaaacagggttgagaggaagaaagggcaatttagccatctgtgtgattatcctcttgtttatcctggctgtcatcaatttaataataacacttgttatttgggccgtgattcgcattggaccaaatggctgtgatagtatggagtttcatgaaagtggcctgcttcgatttaagcaagtatctgacatgggagtgatccaccctctttataaaagcacagtaggaggaaggcgaaatgaaaatttggtcatcactggcaacaaccagcctattgtttttcagcaagggacaacaaagctcagtgtagaaaacaacaaaacttctattacaagtgacatcggcatgcagttttttgacccgaggactcaaaatatcttattcagcacagactatgaaactcatgagtttcatttgccaagtggagtgaaaagtttgaatgttcaaaaggcatctactgaaagggattaccagcaatgctaccagtgatttaaatataaaagttgatgggcgtgctattgtgcgtgnaaatgaangtgtattcattatgggcaaaaaccatttgaatttcncatggggtgggtaatatgggngttaaaggncggaaaaanagtatcatcccnaaatgggatcctgnngaagggtcaaccnccaccccncctacccagtttcntccnantggaaanccatttggggtnanngggggacctgggtanccctncnanctctgcatgngnggntgatnggnanccccttnccaaggngnaaggnaacccacccnaaaanatgggcngccnaanttcnnaaaanacccccntggggaaaanacnntnttaaaaaanccccnaangtccccccnnaanntttnnatatnttgacctngaantttttttnngnaggcaaaantttnttttttanaaaagttnggggaanaacccnaaatatnttttnnggcnaaaaccccnnnnancgtttttnaggnccacaaaanttaaaccncncccnnaaaccccaanttncaaaaaatttttnanatttaccaaccccnaatttanngtcccccnaaannttgaaaanaaaaaanccngngcnttntaaaaaaa

SEQ ID NO: 330 - DNA, 1289 bp, Homo Sapiens
  misc_feature (3)..(3): n is a, c, g, or t
  misc_feature (844)..(844): n is a, c, g, or t
  misc_feature (906)..(906): n is a, c, g, or t
  misc_feature (923)..(923): n is a, c, g, or t
  misc_feature (941)..(941): n is a, c, g, or t
  misc_feature (949)..(949): n is a, c, g, or t
  misc_feature (953)..(953): n is a, c, g, or t
  misc_feature (988)..(988): n is a, c, g, or t
  misc_feature (990)..(990): n is a, c, g, or t
  misc_feature (1004)..(1004): n is a, c, g, or t
  misc_feature (1013)..(1013): n is a, c, g, or t
  misc_feature (1021)..(1021): n is a, c, g, or t
  misc_feature (1025)..(1025): n is a, c, g, or t
  misc_feature (1029)..(1029): n is a, c, g, or t
  misc_feature (1033)..(1034): n is a, c, g, or t
  misc_feature (1044)..(1045): n is a, c, g, or t
  misc_feature (1047)..(1047): n is a, c, g, or t
  misc_feature (1052)..(1052): n is a, c, g, or t
  misc_feature (1055)..(1055): n is a, c, g, or t
  misc_feature (1079)..(1079): n is a, c, g, or t
  misc_feature (1086)..(1086): n is a, c, g, or t
  misc_feature (1095)..(1096): n is a, c, g, or t
  misc_feature (1111)..(1111): n is a, c, g, or t
  misc_feature (1122)..(1122): n is a, c, g, or t
  misc_feature (1124)..(1125): n is a, c, g, or t
  misc_feature (1135)..(1135): n is a, c, g, or t
  misc_feature (1137)..(1137): n is a, c, g, or t
  misc_feature (1151)..(1151): n is a, c, g, or t
  misc_feature (1160)..(1160): n is a, c, g, or t
  misc_feature (1172)..(1172): n is a, c, g, or t
  misc_feature (1177)..(1177): n is a, c, g, or t
  misc_feature (1182)..(1182): n is a, c, g, or t
  misc_feature (1184)..(1185): n is a, c, g, or t
  misc_feature (1187)..(1187): n is a, c, g, or t
  misc_feature (1201)..(1201): n is a, c, g, or t
  misc_feature (1204)..(1204): n is a, c, g, or t
  misc_feature (1213)..(1213): n is a, c, g, or t
  misc_feature (1218)..(1219): n is a, c, g, or t
  misc_feature (1226)..(1226): n is a, c, g, or t
  misc_feature (1229)..(1229): n is a, c, g, or t
  misc_feature (1234)..(1234): n is a, c, g, or t
  misc_feature (1236)..(1237): n is a, c, g, or t
  misc_feature (1241)..(1244): n is a, c, g, or t
  misc_feature (1248)..(1248): n is a, c, g, or t
  misc_feature (1255)..(1255): n is a, c, g, or t
  misc_feature (1261)..(1261): n is a, c, g, or t
  misc_feature (1268)..(1272): n is a, c, g, or t
  misc_feature (1275)..(1277): n is a, c, g, or t
  misc_feature (1287)..(1289): n is a, c, g, or t
atngagaaattactatgagaggatcgcatcaccatcaccatcacggatcctatttaggtgacactatagaatcgtcgacccacgcgtccggagagcgcgggccgcgcgggcgggaagcgaagaggcgggcgggccagcgaggagcgcggagagaaaaggcgcgagcggccaggagggctcaggccgagacaccttgcagctgccgccgccgccaccgagccgccgctgtgctcactgatccgcctccagggccaccgccatgtcgagccgcggtgggaagaagaagtccaccaagacgtccaggtctgccaaagcaggagtcatctttcccgtggggcggatgctgcggtacatcaagaaaggccaccccaagtacaggattggagtgggggcacccgtgtacatggccgccgtcctggaatacctgacagcggagattctggagctggctggcaatgcagcgagagacaacaagaagggacgggtcacaccccggcacatcctgctggctgtggccaatgatgaagagctgaatcagctgctaaaaggagtcaccatagccagtgggggtgtgttacccaacatccaccccgagttgctagcgaagaagcggggatccaaaggaaagttggaagccatcatcacaccacccccagccaaaaaggccaagtctccatcccagaagaagcctgtatctaaaaaagcaggaggcaagaaaggggcccggaaatccaagaagaagcagggtgaagtcagtaaggcagccagcgccgacagcacaaccgagggcacacctgccgacggcttcacagtcctctccaccaagagcctcttccttggccanaagttgcaagttgtacaggctgacattgccctcgatcgacaagtgatgctgtcgttcacccnacaaacactgacttttnacatcggtggtgaagtangaaacacnctgnaaaaaaaaggtggcaaaggaattttgtggaaactntncttggaactcccgnaaaaaaaancgggcccntttnaaanttannttggaacttnntnttcancgncaaggccattggccctgcctgccnaattttntggatccanntgtaaaaaatcccanttttggggggngnnaaaaaaattntnaaaaaatttttggnaaaaaaaanttaaaaaatttntttgnccctngnntnaataataaaaaaanctnaaaatcccntttgnntttcctnccntcggnanngggnnnnaaangtttttncaaaanaaaaaannnnnttnnntttttttttnnn

SEQ ID NO: 331 - DNA, 1359 bp, Homo Sapiens
  misc_feature (826)..(826): n is a, c, g, or t
  misc_feature (876)..(876): n is a, c, g, or t
  misc_feature (905)..(905): n is a, c, g, or t
  misc_feature (912)..(912): n is a, c, g, or t
  misc_feature (915)..(915): n is a, c, g, or t
  misc_feature (935)..(935): n is a, c, g, or t
  misc_feature (955)..(955): n is a, c, g, or t
  misc_feature (957)..(957): n is a, c, g, or t
  misc_feature (959)..(959): n is a, c, g, or t
  misc_feature (966)..(966): n is a, c, g, or t
  misc_feature (978)..(978): n is a, c, g, or t
  misc_feature (986)..(986): n is a, c, g, or t
  misc_feature (1001)..(1001): n is a, c, g, or t
  misc_feature (1003)..(1003): n is a, c, g, or t
  misc_feature (1009)..(1009): n is a, c, g, or t
  misc_feature (1016)..(1017): n is a, c, g, or t
  misc_feature (1032)..(1033): n is a, c, g, or t
  misc_feature (1049)..(1049): n is a, c, g, or t
  misc_feature (1053)..(1053): n is a, c, g, or t
  misc_feature (1056)..(1056): n is a, c, g, or t
  misc_feature (1071)..(1071): n is a, c, g, or t
  misc_feature (1085)..(1170): n is a, c, g, or t
  misc_feature (1174)..(1191): n is a, c, g, or t
  misc_feature (1193)..(1206): n is a, c, g, or t
  misc_feature (1209)..(1216): n is a, c, g, or t
  misc_feature (1218)..(1223): n is a, c, g, or t
  misc_feature (1229)..(1230): n is a, c, g, or t
  misc_feature (1232)..(1233): n is a, c, g, or t
  misc_feature (1235)..(1248): n is a, c, g, or t
  misc_feature (1254)..(1275): n is a, c, g, or t
  misc_feature (1277)..(1297): n is a, c, g, or t
  misc_feature (1300)..(1309): n is a, c, g, or t
  misc_feature (1311)..(1350): n is a, c, g, or t
  misc_feature (1352)..(1357): n is a, c, g, or t
  misc_feature (1359)..(1359): n is a, c, g, or t
agagaaattactatgagaggatcgcatcaccatcaccatcacggatcctatttaggtgacactatagaatcgtcgacccacgcgtccggaaatgggaaaaagggtcatcacactgaaacggtgttcaaccgggttttgccagggcctattgcaccagagagcagcaagaagcgggcccgtaggatgcgaccagacctttctaagatgatggccctcatgcagggtggaagcactgggtctctatctctgcataacacgttccaacacagcagtagtggcctacagtctgtgtcatctttgggtcacagcagtgccacttctgcatctttgccttttatgccatttgtgatgggtggtgcaccatcatcccctcatgtagactccagcaccatgcttcatcaccaccaccaccacccccacccccaccatcaccaccatcaccatccaggcttgagagcccctggctacccctcttcaccagtgactaccgcctctggtactaccttgcggttgccaccactgcaacctgaggaggatgacgatgaggatgaagaagatgatgatgacttatctcagggctatgatagctcagaaagggacttctcactcattgatgatcctatgatgccagctaactcagactccagtgaagatgctgatgactgaagccccagcatgggccccattgcttgggcggctgctgtattttcatttactctggcccttggactatggaaacgtgggaggggcaggggagatgtggggaagtccaggactccaggaggtgaaaaggaaaaaaaaaaaaaaaatgtacctgattgctccnaattatgaaaggattgggtgggcaggggaactcctaaataatacatgacnacttcctcatttctggggaaggaaagganactaaancanctggggtgctcacccctccntagtcacctccattaaccananantatgtancgctggccctancctctggnaaacctgttcctggncnaactgnggaaacnnctggagggcaggaanngttaccttctttcccntggnatnaaaaattaaattaancctttaaaaaaaannnnnnnnnnnnnnnnnnnnnnnnnnnnnnnnnnnnnnnnnnnnnnnnnnnnnnnnnnnnnnnnnnnnnnnnnnnnnnnnnnnnnnaaannnnnnnnnnnnnnnnnncnnnnnnnnnnnnnnaannnnnnnncnnnnnntttttnnannannnnnnnnnnnnnntttttnnnnnnnnnnnnnnnnnnnnnntnnnnnnnnnnnnnnnnnnnnnaannnnnnnnnnannnnnnnnnnnnnnnnnnnnnnnnnnnnnnnnnnnnnnnnannnnnnan

SEQ ID NO: 332 - DNA, 256 bp, Homo Sapiens
gcaaacatctttcaaagaatgtctgtaaacctgtggaggagacacagcgcccgcccacactgcaggagatcaagcagaagatcgacagctacaacacgcgagagaagaactgcctgggcatgaaactgagtgaagacggcacctacacgggtttcatcaaagtgcatctgaaactccggcggcctgtgacggtgcctgctgggatccggccccagtccatctatgatgccatcaaggaggtgaacctggcggctac

SEQ ID NO: 333 - DNA, 1233 bp, Homo Sapiens
  misc_feature (1)..(1): n is a, c, g, or t
  misc_feature (929)..(929): n is a, c, g, or t
  misc_feature (951)..(951): n is a, c, g, or t
  misc_feature (956)..(956): n is a, c, g, or t
  misc_feature (959)..(959): n is a, c, g, or t
  misc_feature (995)..(995): n is a, c, g, or t
  misc_feature (997)..(997): n is a, c, g, or t
  misc_feature (1009)..(1009): n is a, c, g, or t
  misc_feature (1060)..(1060): n is a, c, g, or t
  misc_feature (1074)..(1074): n is a, c, g, or t
  misc_feature (1105)..(1105): n is a, c, g, or t
  misc_feature (1110)..(1110): n is a, c, g, or t
  misc_feature (1115)..(1116): n is a, c, g, or t
  misc_feature (1123)..(1123): n is a, c, g, or t
  misc_feature (1134)..(1134): n is a, c, g, or t
  misc_feature (1142)..(1143): n is a, c, g, or t
  misc_feature (1154)..(1154): n is a, c, g, or t
  misc_feature (1158)..(1158): n is a, c, g, or t
  misc_feature (1160)..(1160): n is a, c, g, or t
  misc_feature (1171)..(1171): n is a, c, g, or t
  misc_feature (1175)..(1175): n is a, c, g, or t
  misc_feature (1195)..(1195): n is a, c, g, or t
  misc_feature (1204)..(1204): n is a, c, g, or t
  misc_feature (1207)..(1208): n is a, c, g, or t
  misc_feature (1215)..(1215): n is a, c, g, or t
  misc_feature (1217)..(1217): n is a, c, g, or t
  misc_feature (1227)..(1227): n is a, c, g, or t
  misc_feature (1232)..(1232): n is a, c, g, or t
naattagagaaattaactatgagaggatcgcatcaccatcaccatcacggatcctatttaggtgacactatagaatcgtcgacccacgcgtccggtggggacgcctctgcgcgaggaacgaggagctacgggcctgggcccggttattgccatgggcagcggctgccgcatcgaatgcatattcttcagcgagttccaccccacgctgggacccaagatcacctatcaggtccctgaagacttcatctcccgagagctgtttgacacagtccaagtgtacatcatcaccaagccagagctgcagaacaagcttatcattgtcacagctatggaaaagaagctgatcggctgtcctgtgtgcatcgaacacaagaagtacagccgcaatgctctcctcttcaacctgggcttcgtgtgtgatgcccaggccaagacctgcgccctcgagcccattgttaaaaagctggctggctatctgaccacactagagctagagagcagcttcgtgtccatggaggagagcaagcagaagttggtgcccatcatgaccatcttgctggaggagctaaatgcctcaggccggtgcactctgcccattgatgagtccaacaccatccacttgaaggtgattgagcagcggccagaccctccggtggcccaggagtatgatgtacctgtctttaccaaagacaaggaggatttcttcaactcacagtgggacctcactacacaacaaatcctgccctacattgatgggttccgccacatccagaagatttcagcagaggcagatgtggagctcaacctggtgcgcattgctatccagaacctgctgtactacggcgtttgtgacactggtgtccatcctccaggaagctgatccagttcgggcttatgaaaaacctcatcaggcgactacaaaagtatcntgtgcgggtgactcgggaagancaaanccncctgcccggtttttacaggctgccacagctatgaananatttgctgcaanaaagggcttgacctaccatgaactggatgaccgcttgaaaatgaccccaanatcttctttgctgnaaatgaggctggaatgactgatggaaccatngctgnggtanncccctanaagaggctggnctacggtnnaaggtgacctnattngnaaaaaaaatcntttnaaaaaaaaaaaaaaaaaaangggggcccnccnnaggggcnanaaactttttngggang

SEQ ID NO: 334 - DNA, 256 bp, Homo Sapiens
  misc_feature (19)..(19): n is a, c, g, or t
ttattaaagaggagaaatnactctgagaggatcgcatcaccatcaccatcacggatcctatttaggtgacactatagaatcgtcgacccacgcgtccgagatgacctctcccgtctacggcaccgacatgatggtgggcatcgggacgtcggatgtggacctggacaaataccgccacacgttctgcagcctgctgggcagggatgaggacagctggggcctctcctacacgggcctcctccaccacaagggcgac

SEQ ID NO: 335 - DNA, 1435 bp, Homo Sapiens
  misc_feature (1)..(1): n is a, c, g, or t
  misc_feature (3)..(3): n is a, c, g, or t
  misc_feature (762)..(762): n is a, c, g, or t
  misc_feature (811)..(811): n is a, c, g, or t
  misc_feature (897)..(897): n is a, c, g, or t
  misc_feature (908)..(908): n is a, c, g, or t
  misc_feature (957)..(957): n is a, c, g, or t
  misc_feature (973)..(973): n is a, c, g, or t
  misc_feature (976)..(976): n is a, c, g, or t
  misc_feature (980)..(980): n is a, c, g, or t
  misc_feature (998)..(999): n is a, c, g, or t
  misc_feature (1002)..(1002): n is a, c, g, or t
  misc_feature (1007)..(1007): n is a, c, g, or t
  misc_feature (1013)..(1013): n is a, c, g, or t
  misc_feature (1017)..(1017): n is a, c, g, or t
  misc_feature (1031)..(1031): n is a, c, g, or t
  misc_feature (1036)..(1036): n is a, c, g, or t
  misc_feature (1044)..(1045): n is a, c, g, or t
  misc_feature (1052)..(1053): n is a, c, g, or t
  misc_feature (1059)..(1059): n is a, c, g, or t
  misc_feature (1067)..(1067): n is a, c, g, or t
  misc_feature (1070)..(1070): n is a, c, g, or t
  misc_feature (1072)..(1072): n is a, c, g, or t
  misc_feature (1075)..(1075): n is a, c, g, or t
  misc_feature (1085)..(1085): n is a, c, g, or t
  misc_feature (1093)..(1093): n is a, c, g, or t
  misc_feature (1111)..(1111): n is a, c, g, or t
  misc_feature (1122)..(1123): n is a, c, g, or t
  misc_feature (1134)..(1134): n is a, c, g, or t
  misc_feature (1140)..(1140): n is a, c, g, or t
  misc_feature (1148)..(1148): n is a, c, g, or t
  misc_feature (1150)..(1150): n is a, c, g, or t
  misc_feature (1157)..(1158): n is a, c, g, or t
  misc_feature (1162)..(1162): n is a, c, g, or t
  misc_feature (1164)..(1165): n is a, c, g, or t
  misc_feature (1169)..(1169): n is a, c, g, or t
  misc_feature (1187)..(1187): n is a, c, g, or t
  misc_feature (1192)..(1192): n is a, c, g, or t
  misc_feature (1197)..(1197): n is a, c, g, or t
  misc_feature (1207)..(1207): n is a, c, g, or t
  misc_feature (1222)..(1222): n is a, c, g, or t
  misc_feature (1229)..(1229): n is a, c, g, or t
  misc_feature (1237)..(1237): n is a, c, g, or t
  misc_feature (1249)..(1249): n is a, c, g, or t
  misc_feature (1255)..(1255): n is a, c, g, or t
  misc_feature (1260)..(1260): n is a, c, g, or t
  misc_feature (1266)..(1266): n is a, c, g, or t
  misc_feature (1268)..(1268): n is a, c, g, or t
  misc_feature (1276)..(1276): n is a, c, g, or t
  misc_feature (1278)..(1278): n is a, c, g, or t
  misc_feature (1288)..(1288): n is a, c, g, or t
  misc_feature (1290)..(1290): n is a, c, g, or t
  misc_feature (1292)..(1292): n is a, c, g, or t
  misc_feature (1294)..(1294): n is a, c, g, or t
  misc_feature (1297)..(1297): n is a, c, g, or t
  misc_feature (1304)..(1304): n is a, c, g, or t
  misc_feature (1312)..(1312): n is a, c, g, or t
  misc_feature (1316)..(1316): n is a, c, g, or t
  misc_feature (1321)..(1321): n is a, c, g, or t
  misc_feature (1323)..(1323): n is a, c, g, or t
  misc_feature (1336)..(1336): n is a, c, g, or t
  misc_feature (1343)..(1343): n is a, c, g, or t
  misc_feature (1352)..(1352): n is a, c, g, or t
  misc_feature (1354)..(1354): n is a, c, g, or t
  misc_feature (1357)..(1357): n is a, c, g, or t
  misc_feature (1362)..(1362): n is a, c, g, or t
  misc_feature (1365)..(1365): n is a, c, g, or t
  misc_feature (1368)..(1369): n is a, c, g, or t
  misc_feature (1374)..(1374): n is a, c, g, or t
  misc_feature (1384)..(1384): n is a, c, g, or t
  misc_feature (1386)..(1386): n is a, c, g, or t
  misc_feature (1389)..(1390): n is a, c, g, or t
  misc_feature (1394)..(1394): n is a, c, g, or t
  misc_feature (1400)..(1400): n is a, c, g, or t
  misc_feature (1403)..(1403): n is a, c, g, or t
  misc_feature (1412)..(1412): n is a, c, g, or t
ntntagagaaattactatgagaggatcgcatcaccatcaccatcacggatcctatttaggtgacactatagaatcgtcgacccacgcgtccgcctgcctactgcagcgtaggcctcgcctcaacggcaggagagcaggcggctgcggttgctgcagccttcagtctccacccggactacgccatgttggggtttgtgggtcgggtggccgctgctccggcctccggggccttgcggagactcaccccttcagcgtcgctgcccccagctcagctcttactgcgggccgctccgacggcggtccatcctgtcagggactatgcggcgcaaacatctccttcgccaaaagcaggcgccgccaccgggcgcatcgtggcggtcattggcgcagtggtggacgtccagtttgatgagggactaccaccaattctaaatgccctggaagtgcaaggcagggagaccagactggttttggaggtggcccagcatttgggtgagagcacagtaaggactattgctatggatggtacagaaggcttggttagaggccagaaagtactggattctggtgcaccaatcaaaattcctgttggtcctgagactttgggcagaatcatgaatgtcattggagaacctattgatgaaagaggtcccatcaaaaccaaacaatttgctcccattcatgctgaggctccaaagttcatggaaatgagtgttgagcaggaaattctggtgactggtatcaaggttgtcgatctgctanctccctatgccaagggtggcaaaattggtcttttttggtggtgctgganttggcaagactgtactgatcatggagttaatcaacaatgtcgcccaaagcccatggtggttactctgtgtttgctggtggttggtnaaaaggacccntgaaaggcaatgaattaataccatgaaaatgatttgaatctggtgttanccaacttaaaagaatnccncctnctaaagtaaccgcttggnntantggtncaaatnaatnaacccaccctggtnccccntgccccgnntaacctnncaactnggcctgantgngnctnaataccttcnaaaaaacnaagaaagtcaaaaaaggnactgccatttnnttgaaaaaatnctttcncttccccncnatgggtnnaaananntctnccattattgggcccaaanccctntgccntggggactanaacctccccggcccncgaaatngggtcctnttcggaaaaaanttcctncccanaaagtntnttcccccntnaaagccaacntntncnccntaaaaantatataanaccnccccnanaaaactttccctnttaacancccaaaatncncgnacctnttnaanngggcnaatcctgtgnanccnnaaancccccntanaaaagacanaagttgcagaataaaattccccg

SEQ ID NO: 336 - DNA, 1183 bp, Homo Sapiens
  misc_feature (956)..(956): n is a, c, g, or t
  misc_feature (974)..(974): n is a, c, g, or t
  misc_feature (988)..(988): n is a, c, g, or t
  misc_feature (998)..(998): n is a, c, g, or t
  misc_feature (1008)..(1008): n is a, c, g, or t
  misc_feature (1016)..(1016): n is a, c, g, or t
  misc_feature (1021)..(1021): n is a, c, g, or t
  misc_feature (1036)..(1036): n is a, c, g, or t
  misc_feature (1039)..(1039): n is a, c, g, or t
  misc_feature (1058)..(1058): n is a, c, g, or t
  misc_feature (1067)..(1068): n is a, c, g, or t
  misc_feature (1084)..(1084): n is a, c, g, or t
  misc_feature (1086)..(1086): n is a, c, g, or t
  misc_feature (1089)..(1089): n is a, c, g, or t
  misc_feature (1112)..(1112): n is a, c, g, or t
  misc_feature (1117)..(1117): n is a, c, g, or t
  misc_feature (1126)..(1126): n is a, c, g, or t
  misc_feature (1133)..(1133): n is a, c, g, or t
  misc_feature (1139)..(1139): n is a, c, g, or t
  misc_feature (1144)..(1144): n is a, c, g, or t
  misc_feature (1152)..(1152): n is a, c, g, or t
  misc_feature (1154)..(1154): n is a, c, g, or t
  misc_feature (1159)..(1159): n is a, c, g, or t
  misc_feature (1163)..(1163): n is a, c, g, or t
agaaattaactatgagaggatcgcatcaccatcaccatcacggatcctatttaggtgacactatagaatcgtcgacccacgcgtccgctcctgtggattatgacggtgggcggacaagatccgacatcgtgtcccgggcccttgatttgttttctgataacgccccacctcctgagctgcttgagattatcaacgaggacattgccaagaggacgtgtgaggagcaccagctctgtgttgtggctgtgctgccccatatccttgatactggagctgcaggcagaaattcttatctggaagttcttctgaagttggcagacaaatacaaaaagaaaatgtgggggtggctgtggacagaagctggagcccagtctgaacttgagaccgcgttggggattggagggtttgggtaccccgccatggccgccatcaatgcacgcaagatgaaatttgctctgctaaaaggctccttcagtgagcaaggcatcaacgagtttctcagggagctctcttttgggcgtggctccacggcacctgtaggaggcggggctttccctaccatcgttgagagagagccttgggacggcagggatggcgagcttcccgtggaggatgacattgacctcagtgatgtggagcttgatgacttagggaaagatgagttgtgagagccacaacagaggcttcagaccattttcttttcttgggagccagtggatttttccagcagtgaagggacattctctacactcagatgactctaccagtggccttttaaccaagaagtagtacttgattggtcatttgaaaacactgcaacagtgaacttttgcatctcaagaaaacattgaaaaattctatgaattgttgtagccggtgaattgagtcgtattctgtcacataatattttgaaaaaaacttggctgtcgaaacatttttctctctgactgctgctngaatgttcttggagctgnttcttatgtagggntttttttaangggatccctncattgaanataanggcttttccattaanaanaaatatttggacatgccanaatgttganntagtacccatctaatncnaangagttacataatcaaatttgaangaacnaagtcttcnccccaantttaanaaaanaacctttntnaaggncccngcccccaaaattttgaacgc

SEQ ID NO: 337 - DNA, 256 bp, Homo Sapiens
  misc_feature (1)..(1): n is a, c, g, or t
nactatgagaggatcgcatcaccatcaccatcacggatcctatttaggtgacactatagaatcgtcgacccacgcgtccgcccacgcgtccgcccacgcgtccggcgccgccgccgccgccgcagccgccggagccgcaatgcctaaaggaggaagaaagggaggccacaaaggccgggcgaggcagtatacaagccctgaggagatcgacgcgcagctgcaggctgagaagcagaaggccagggaagaagaggag

SEQ ID NO: 338 - DNA, 1224 bp, Homo Sapiens
  misc_feature (721)..(721): n is a, c, g, or t
  misc_feature (800)..(800): n is a, c, g, or t
  misc_feature (808)..(808): n is a, c, g, or t
  misc_feature (820)..(820): n is a, c, g, or t
  misc_feature (822)..(822): n is a, c, g, or t
  misc_feature (825)..(825): n is a, c, g, or t
  misc_feature (836)..(836): n is a, c, g, or t
  misc_feature (854)..(854): n is a, c, g, or t
  misc_feature (856)..(856): n is a, c, g, or t
  misc_feature (864)..(864): n is a, c, g, or t
  misc_feature (874)..(874): n is a, c, g, or t
  misc_feature (878)..(878): n is a, c, g, or t
  misc_feature (884)..(884): n is a, c, g, or t
  misc_feature (889)..(889): n is a, c, g, or t
  misc_feature (916)..(916): n is a, c, g, or t
  misc_feature (922)..(922): n is a, c, g, or t
  misc_feature (949)..(949): n is a, c, g, or t
  misc_feature (953)..(953): n is a, c, g, or t
  misc_feature (964)..(964): n is a, c, g, or t
  misc_feature (976)..(976): n is a, c, g, or t
  misc_feature (993)..(993): n is a, c, g, or t
  misc_feature (995)..(995): n is a, c, g, or t
  misc_feature (998)..(998): n is a, c, g, or t
  misc_feature (1007)..(1007): n is a, c, g, or t
  misc_feature (1017)..(1017): n is a, c, g, or t
  misc_feature (1026)..(1026): n is a, c, g, or t
  misc_feature (1035)..(1036): n is a, c, g, or t
  misc_feature (1038)..(1038): n is a, c, g, or t
  misc_feature (1051)..(1051): n is a, c, g, or t
  misc_feature (1060)..(1060): n is a, c, g, or t
  misc_feature (1062)..(1062): n is a, c, g, or t
  misc_feature (1069)..(1069): n is a, c, g, or t
  misc_feature (1075)..(1075): n is a, c, g, or t
  misc_feature (1078)..(1078): n is a, c, g, or t
  misc_feature (1082)..(1082): n is a, c, g, or t
  misc_feature (1095)..(1095): n is a, c, g, or t
  misc_feature (1102)..(1102): n is a, c, g, or t
  misc_feature (1105)..(1106): n is a, c, g, or t
  misc_feature (1111)..(1113): n is a, c, g, or t
  misc_feature (1128)..(1128): n is a, c, g, or t
  misc_feature (1136)..(1136): n is a, c, g, or t
  misc_feature (1138)..(1139): n is a, c, g, or t
  misc_feature (1142)..(1143): n is a, c, g, or t
  misc_feature (1149)..(1149): n is a, c, g, or t
  misc_feature (1151)..(1151): n is a, c, g, or t
  misc_feature (1157)..(1159): n is a, c, g, or t
  misc_feature (1163)..(1163): n is a, c, g, or t
  misc_feature (1165)..(1166): n is a, c, g, or t
  misc_feature (1170)..(1172): n is a, c, g, or t
  misc_feature (1174)..(1174): n is a, c, g, or t
  misc_feature (1180)..(1180): n is a, c, g, or t
  misc_feature (1183)..(1183): n is a, c, g, or t
  misc_feature (1191)..(1191): n is a, c, g, or t
  misc_feature (1193)..(1193): n is a, c, g, or t
  misc_feature (1197)..(1197): n is a, c, g, or t
  misc_feature (1199)..(1200): n is a, c, g, or t
  misc_feature (1210)..(1211): n is a, c, g, or t
  misc_feature (1217)..(1218): n is a, c, g, or t
tagagaaattactatgagaggatcgcatcaccatcaccatcacggatcctatttaggtgacactatagaatcgtcgacccacgcgtccgcccacgcgtccgagaaaggaaccaagcgagcagtggccactaagtttgtgaacaagaagttgatgaagcgcgaccaggtcacccatgagcttggcatcctgcagagcctccagcaccccctgcttgtcggcctcctcgacacctttgagacccccaccagctacatcctggtcttagaaatggctgaccagggtcgcctcctggactgcgtggtgcgatggggaagcctcactgaagggaagatcagggcgcacctgggggaggttctggaagctgtccggtacctgcacaactgcaggatagcacacctggacctaaagcctgagaatatcctggtggatgagagtttagccaagccaaccatcaaactggctgactttggagatgctgttcagctcaacacgacctactacatccaccagttactggggaaccctgaattcgcagcccctgaaatcatcctcgggaaccctgtctccctgacctcggatacgtggagtgttggagtgctcacatacgtacttcttagtggcgtgtcccccttcctggatgacagtgtggaagagacctgcctgaacatttgccgcttagactttagcttcccagatgactactttaaaggagtgagccanaaggccaaggagttcgtgtgcttcctcctgcaggaggaccccgccaagcgtccctcggctgcgctggccctccaaggancagtggcntgcaaggcccgncnacnggcaataagcncggggccgtcctcgaacncnttccaganttgacttccnttcnttgagngggcngcaaacaccagaaatgatgttcgaacntatccntagcattaaaaactttctgccaaagcnaggnttctgccctanaatttgaacttntccaaaaattcttttcncnttntctttcacntgccaatcanttttttatntgaaatttnngnaaaaacaggcaancttaactgntnccctgcnggttgngtncccngggggaaattgcnttccaanggnnttggnnncaaaatgtttgaaanaaaatttnannttnncttggngnaaaaannnctcntnnattnnncnaggganaanggcctttntnttancnnatttttttcnnttttcnncaaaaa

SEQ ID NO: 339 - DNA, 256 bp, Homo Sapiens
  misc_feature (1)..(1): n is a, c, g, or t
  misc_feature (3)..(3): n is a, c, g, or t
nanctatgagaggatcgcatcaccatcaccatcacggatcctatttaggtgacactatagaatcgtcgacccacgcgtccgcccacgcgtccggcgcaggagccgcagggccgtaggcagccatggcgcccagccggaatggcatggtcttgaagccccacttccacaaggactggcagcggcgcgtggccacgtggttcaaccagccggcccgtaagatccgcagacgtaaggcccggcaagccaaggcgcgccg

SEQ ID NO: 340 - DNA, 256 bp, Homo Sapiens
tgatggctggcggagtcatggacaaggagtacgtgggttttgctgctctccccaaccagctgcaccgcaagtctgtcaagaaggggtttgacttcacgctaatggtggcaggggagtcaggcctagggaaatccaccctcatcaacagcctcttcctcaccaacctctatgaggatcgccaggtgccagaggccagtgctcgcttgacacagaccctggccattgagcgccggggcgtagagattgaggaaggggt

SEQ ID NO: 341 - DNA, 1444 bp, Homo Sapiens
  misc_feature (64)..(64): n is a, c, g, or t
  misc_feature (110)..(110): n is a, c, g, or t
  misc_feature (123)..(123): n is a, c, g, or t
  misc_feature (126)..(126): n is a, c, g, or t
  misc_feature (128)..(128): n is a, c, g, or t
  misc_feature (169)..(169): n is a, c, g, or t
  misc_feature (185)..(185): n is a, c, g, or t
  misc_feature (193)..(193): n is a, c, g, or t
  misc_feature (247)..(247): n is a, c, g, or t
  misc_feature (262)..(262): n is a, c, g, or t
  misc_feature (267)..(267): n is a, c, g, or t
  misc_feature (269)..(269): n is a, c, g, or t
  misc_feature (297)..(297): n is a, c, g, or t
  misc_feature (373)..(373): n is a, c, g, or t
  misc_feature (381)..(381): n is a, c, g, or t
  misc_feature (451)..(451): n is a, c, g, or t
  misc_feature (480)..(480): n is a, c, g, or t
  misc_feature (501)..(501): n is a, c, g, or t
  misc_feature (507)..(507): n is a, c, g, or t
  misc_feature (552)..(552): n is a, c, g, or t
  misc_feature (612)..(612): n is a, c, g, or t
  misc_feature (650)..(650): n is a, c, g, or t
  misc_feature (666)..(666): n is a, c, g, or t
  misc_feature (693)..(693): n is a, c, g, or t
  misc_feature (710)..(710): n is a, c, g, or t
  misc_feature (752)..(752): n is a, c, g, or t
  misc_feature (766)..(766): n is a, c, g, or t
  misc_feature (775)..(775): n is a, c, g, or t
  misc_feature (791)..(791): n is a, c, g, or t
  misc_feature (799)..(799): n is a, c, g, or t
  misc_feature (805)..(805): n is a, c, g, or t
  misc_feature (824)..(824): n is a, c, g, or t
  misc_feature (831)..(831): n is a, c, g, or t
  misc_feature (837)..(837): n is a, c, g, or t
  misc_feature (844)..(845): n is a, c, g, or t
  misc_feature (847)..(847): n is a, c, g, or t
  misc_feature (855)..(855): n is a, c, g, or t
  misc_feature (866)..(866): n is a, c, g, or t
  misc_feature (868)..(868): n is a, c, g, or t
  misc_feature (874)..(877): n is a, c, g, or t
  misc_feature (891)..(891): n is a, c, g, or t
  misc_feature (913)..(914): n is a, c, g, or t
  misc_feature (918)..(919): n is a, c, g, or t
  misc_feature (939)..(939): n is a, c, g, or t
  misc_feature (942)..(943): n is a, c, g, or t
  misc_feature (953)..(955): n is a, c, g, or t
  misc_feature (958)..(958): n is a, c, g, or t
  misc_feature (966)..(966): n is a, c, g, or t
  misc_feature (978)..(978): n is a, c, g, or t
  misc_feature (982)..(983): n is a, c, g, or t
  misc_feature (989)..(989): n is a, c, g, or t
  misc_feature (996)..(998): n is a, c, g, or t
  misc_feature (1002)..(1002): n is a, c, g, or t
  misc_feature (1007)..(1007): n is a, c, g, or t
  misc_feature (1010)..(1010): n is a, c, g, or t
  misc_feature (1013)..(1013): n is a, c, g, or t
  misc_feature (1018)..(1018): n is a, c, g, or t
  misc_feature (1021)..(1021): n is a, c, g, or t
  misc_feature (1031)..(1032): n is a, c, g, or t
  misc_feature (1044)..(1044): n is a, c, g, or t
  misc_feature (1055)..(1055): n is a, c, g, or t
  misc_feature (1058)..(1058): n is a, c, g, or t
  misc_feature (1062)..(1062): n is a, c, g, or t
  misc_feature (1067)..(1067): n is a, c, g, or t
  misc_feature (1073)..(1073): n is a, c, g, or t
  misc_feature (1075)..(1075): n is a, c, g, or t
  misc_feature (1082)..(1082): n is a, c, g, or t
  misc_feature (1086)..(1086): n is a, c, g, or t
  misc_feature (1093)..(1093): n is a, c, g, or t
  misc_feature (1101)..(1102): n is a, c, g, or t
  misc_feature (1109)..(1109): n is a, c, g, or t
  misc_feature (1112)..(1112): n is a, c, g, or t
  misc_feature (1119)..(1119): n is a, c, g, or t
  misc_feature (1124)..(1125): n is a, c, g, or t
  misc_feature (1127)..(1127): n is a, c, g, or t
  misc_feature (1132)..(1132): n is a, c, g, or t
  misc_feature (1138)..(1138): n is a, c, g, or t
  misc_feature (1147)..(1147): n is a, c, g, or t
  misc_feature (1152)..(1152): n is a, c, g, or t
  misc_feature (1172)..(1172): n is a, c, g, or t
  misc_feature (1184)..(1184): n is a, c, g, or t
  misc_feature (1186)..(1186): n is a, c, g, or t
  misc_feature (1195)..(1195): n is a, c, g, or t
  misc_feature (1199)..(1199): n is a, c, g, or t
  misc_feature (1204)..(1204): n is a, c, g, or t
  misc_feature (1206)..(1206): n is a, c, g, or t
  misc_feature (1208)..(1209): n is a, c, g, or t
  misc_feature (1211)..(1211): n is a, c, g, or t
  misc_feature (1215)..(1216): n is a, c, g, or t
  misc_feature (1218)..(1218): n is a, c, g, or t
  misc_feature (1220)..(1220): n is a, c, g, or t
  misc_feature (1235)..(1235): n is a, c, g, or t
  misc_feature (1274)..(1274): n is a, c, g, or t
  misc_feature (1278)..(1278): n is a, c, g, or t
  misc_feature (1280)..(1280): n is a, c, g, or t
  misc_feature (1284)..(1284): n is a, c, g, or t
  misc_feature (1288)..(1289): n is a, c, g, or t
  misc_feature (1297)..(1297): n is a, c, g, or t
  misc_feature (1299)..(1299): n is a, c, g, or t
  misc_feature (1301)..(1301): n is a, c, g, or t
  misc_feature (1303)..(1303): n is a, c, g, or t
  misc_feature (1309)..(1309): n is a, c, g, or t
  misc_feature (1316)..(1316): n is a, c, g, or t
  misc_feature (1319)..(1319): n is a, c, g, or t
  misc_feature (1321)..(1321): n is a, c, g, or t
  misc_feature (1329)..(1330): n is a, c, g, or t
  misc_feature (1339)..(1339): n is a, c, g, or t
  misc_feature (1342)..(1342): n is a, c, g, or t
  misc_feature (1346)..(1346): n is a, c, g, or t
  misc_feature (1349)..(1349): n is a, c, g, or t
  misc_feature (1351)..(1351): n is a, c, g, or t
  misc_feature (1362)..(1363): n is a, c, g, or t
  misc_feature (1373)..(1373): n is a, c, g, or t
  misc_feature (1380)..(1380): n is a, c, g, or t
  misc_feature (1388)..(1389): n is a, c, g, or t
  misc_feature (1391)..(1391): n is a, c, g, or t
  misc_feature (1401)..(1401): n is a, c, g, or t
  misc_feature (1405)..(1405): n is a, c, g, or t
  misc_feature (1409)..(1409): n is a, c, g, or t
  misc_feature (1411)..(1412): n is a, c, g, or t
  misc_feature (1417)..(1418): n is a, c, g, or t
  misc_feature (1427)..(1427): n is a, c, g, or t
  misc_feature (1431)..(1432): n is a, c, g, or t
  misc_feature (1438)..(1438): n is a, c, g, or t
  misc_feature (1440)..(1440): n is a, c, g, or t
  misc_feature (1443)..(1444): n is a, c, g, or t
attagagagaattactatgagaggatcgcatccccatcaccatcacggatcctatttaggtganactatagaatcgtcgacccacgcgtccggtggcattaaagaagacnctgaagaacttcnccnangagattattttgaacagtatggaaaaattgaagtgattganatcatgactgaccgangcagtggnaagaaaaggggctttgcctttgtaacctttgacgaccatgactccgtggataanattgtcattcagaantaccntnctgtgaatggccacaactgtgaagttanaaaagccctgtcaaagcaagagatggctagtgcttcatccagccaaagaggtcgaagtggttctggaaactttggnggaggtcntggaggtggtttcggtgggaatgacaacttcggtcgtggaggaaacttcagtggtcgtggtggctttggnggcagccgtggtggtggtggatatggtgncagtggggatggctataatgnatttgntaatgatggtggttatggaggaggcggccctggttactctggagnaagcagaggctatggaagtggtggacagggttatggaaaccagggcagtggctatggcgngagtggcagctatgacagctataacaacggaggcggangcggctttggcggtgntagtgcaagcaattttggagttggtgnaagctacaatgattttnggaattacaaacaatcagtcttcaaattttggacccatgaanggaggaaattttgnaggcaaaanctctggcccctatggnggttggangccaanactttgcaaaaaccacaanacccaanttggcnatgggcnnantcccagcnacccgcagtancnatggcnnnnggccagaacatttnaatttaggaaacaaaagccttnncatnnaaaaggagaccccccaaaantgnncagggaaacnnncangtttacanaccgaatttgtnaacnnctcccnaccacannnggtngccanggnccnaactnctncaaaaaaaanntggtttttaaanccaaaaccccnttngcangggcnaaaaantnccaggantgtntttgggnactatttnnaatacanggnttttttnaattnntntccgnggaaangttaaaccnttccnccaaggggtttaaaggaaantttttttttttncnccccagcgnttanttccnanannanaaanntncncgaacgtcaaaaaantttttttttaaaaaaaaaaaaaaggccccccccccttanggangnaaancttnnctcctcanangncnccttgnaacccanaancncacaaccnntgtttttanaanccgnccncngcactttttgnnaacccccttnggatttngatctcannanagaaaaaacngaancccncnnacccnnccaaatttnttcnnccttcncnaann

SEQ ID NO: 342 - DNA, 256 bp, Homo Sapiens
  misc_feature (1)..(1): n is a, c, g, or t
  misc_feature (3)..(3): n is a, c, g, or t
nanctatgagaggatcgcatcaccatcaccatcacggatcctatttaggtgacactatagaatcgtcgacccacgcgtccgacctgacagaattccagaccaacctggtgccctatccccgcatccacttccctctggccacatatgcccctgtcatctctgctgagaaagcctaccatgaacagctttctgtagcagagatcaccaatgcttgctttgagccagccaaccagatggtgaaatgtgaccctcgcca

SEQ ID NO: 343 - DNA, 1229 bp, Homo Sapiens
  misc_feature (861)..(861): n is a, c, g, or t
  misc_feature (912)..(912): n is a, c, g, or t
  misc_feature (918)..(918): n is a, c, g, or t
  misc_feature (943)..(943): n is a, c, g, or t
  misc_feature (956)..(956): n is a, c, g, or t
  misc_feature (967)..(967): n is a, c, g, or t
  misc_feature (988)..(988): n is a, c, g, or t
  misc_feature (994)..(994): n is a, c, g, or t
  misc_feature (1024)..(1024): n is a, c, g, or t
  misc_feature (1048)..(1048): n is a, c, g, or t
  misc_feature (1079)..(1080): n is a, c, g, or t
  misc_feature (1086)..(1086): n is a, c, g, or t
  misc_feature (1092)..(1092): n is a, c, g, or t
  misc_feature (1097)..(1098): n is a, c, g, or t
  misc_feature (1100)..(1100): n is a, c, g, or t
  misc_feature (1111)..(1111): n is a, c, g, or t
  misc_feature (1135)..(1135): n is a, c, g, or t
  misc_feature (1145)..(1145): n is a, c, g, or t
  misc_feature (1148)..(1148): n is a, c, g, or t
  misc_feature (1152)..(1152): n is a, c, g, or t
  misc_feature (1154)..(1154): n is a, c, g, or t
  misc_feature (1156)..(1156): n is a, c, g, or t
  misc_feature (1158)..(1158): n is a, c, g, or t
  misc_feature (1162)..(1162): n is a, c, g, or t
  misc_feature (1165)..(1166): n is a, c, g, or t
  misc_feature (1178)..(1179): n is a, c, g, or t
  misc_feature (1200)..(1200): n is a, c, g, or t
  misc_feature (1213)..(1213): n is a, c, g, or t
  misc_feature (1221)..(1221): n is a, c, g, or t
  misc_feature (1226)..(1226): n is a, c, g, or t
gagaaattactatgagaggatcgcatcaccatcaccatcacggatcctatttaggtgacactatagaatcgtcgacccacgcgtccgcccggatccagggagaactggagaagttaaatcagtccacggatgatatcaacagacgggagactgaacttgaggatgctcgtcagaagttccgctctgttctggttgaagcaacggtgaaactggatgaactggtgaagaaaattggcaaagctgtggaagactccaagccctactgggaggcacggagggtggcgaggcaggctcagctggaagctcagaaagccacgcaggacttccagagggccacagaggtgctccgcgccgccaaggagaccatctccctggccgagcagcggctgctggaggatgacaagcggcagttcgactccgcctggcaggagatgctgaatcacgccactcagagggtcatggaggcggagcagaccaagaccaggagcgagctggtgcataaggagacggcagccaggtacaatgccgccatgggccgcatgcgacagctggagaagaaactcaagagagccatcaacaagtccaagccttattttgaactcaaggcaaagtactatgtgcagctcgagcaactgaaaaagactgtggatgacctgcaggccaaactgaccctggcaaaaggcgagtacaagatggccctgaagaacctggagatgatctcagatgagatccacgagcggcggcgctccagtgccatggggcctcggggatgcggtgttggtgctgagggcagcagcacatctgtggaggatctgccagggagcaaacctgagcctgatgccatttctggagacagggcanaaggggcagagaataaacaagtgacaaagccaacaacaaccggggcctcancagtancagtggcagtggtggcagcagtaanagccaaagcagcncctcccctganggccaggccttggaaaaccgnatgaancactttccctacgtgctcaagggaagaaanggaattattgctgacttaaaatgntgcaaatggctgattctcctgggccctggcnnagtgcntttcanctttnncntggaactgganaacttttgcccatattcttttaantttgccaaanttnaccntntncntaantgnnctatgaatttcnngaccttgaggctaaaattttnttttggtaaaacnttgggtgnttttnaaa

SEQ ID NO: 344 - DNA, 256 bp, Homo Sapiens
acatattggagaaaaaagttgaaaaggtggttgtgtcaaaccgattggtgacatctccatgctgtattgtcacaagcacatatggctggacagcaaacatggagagaatcatgaaagctcaagccctaagagacaactcaacaatgggttacatggcagcaaagaaacacctggagataaaccctgaccattccattattgagaccttaaggcaaaaggcagaggctgataagaacgacaagtctgtgaaggatct

SEQ ID NO: 345 - DNA, 1393 bp, Homo Sapiens
  misc_feature (4)..(4): n is a, c, g, or t
  misc_feature (10)..(10): n is a, c, g, or t
  misc_feature (567)..(567): n is a, c, g, or t
  misc_feature (582)..(582): n is a, c, g, or t
  misc_feature (652)..(652): n is a, c, g, or t
  misc_feature (768)..(768): n is a, c, g, or t
  misc_feature (796)..(796): n is a, c, g, or t
  misc_feature (802)..(802): n is a, c, g, or t
  misc_feature (807)..(807): n is a, c, g, or t
  misc_feature (818)..(818): n is a, c, g, or t
  misc_feature (821)..(821): n is a, c, g, or t
  misc_feature (833)..(833): n is a, c, g, or t
  misc_feature (844)..(844): n is a, c, g, or t
  misc_feature (867)..(867): n is a, c, g, or t
  misc_feature (883)..(883): n is a, c, g, or t
  misc_feature (906)..(906): n is a, c, g, or t
  misc_feature (922)..(922): n is a, c, g, or t
  misc_feature (945)..(945): n is a, c, g, or t
  misc_feature (955)..(955): n is a, c, g, or t
  misc_feature (961)..(961): n is a, c, g, or t
  misc_feature (966)..(966): n is a, c, g, or t
  misc_feature (972)..(972): n is a, c, g, or t
  misc_feature (977)..(977): n is a, c, g, or t
  misc_feature (979)..(979): n is a, c, g, or t
  misc_feature (991)..(991): n is a, c, g, or t
  misc_feature (1000)..(1000): n is a, c, g, or t
  misc_feature (1003)..(1003): n is a, c, g, or t
  misc_feature (1005)..(1005): n is a, c, g, or t
  misc_feature (1026)..(1026): n is a, c, g, or t
  misc_feature (1049)..(1049): n is a, c, g, or t
  misc_feature (1063)..(1064): n is a, c, g, or t
  misc_feature (1068)..(1068): n is a, c, g, or t
  misc_feature (1071)..(1072): n is a, c, g, or t
  misc_feature (1074)..(1074): n is a, c, g, or t
  misc_feature (1078)..(1078): n is a, c, g, or t
  misc_feature (1084)..(1085): n is a, c, g, or t
  misc_feature (1091)..(1091): n is a, c, g, or t
  misc_feature (1093)..(1093): n is a, c, g, or t
  misc_feature (1098)..(1098): n is a, c, g, or t
  misc_feature (1103)..(1103): n is a, c, g, or t
  misc_feature (1105)..(1105): n is a, c, g, or t
  misc_feature (1107)..(1107): n is a, c, g, or t
  misc_feature (1110)..(1110): n is a, c, g, or t
  misc_feature (1112)..(1112): n is a, c, g, or t
  misc_feature (1118)..(1118): n is a, c, g, or t
  misc_feature (1120)..(1120): n is a, c, g, or t
  misc_feature (1128)..(1128): n is a, c, g, or t
  misc_feature (1133)..(1133): n is a, c, g, or t
  misc_feature (1137)..(1137): n is a, c, g, or t
  misc_feature (1139)..(1139): n is a, c, g, or t
  misc_feature (1147)..(1148): n is a, c, g, or t
  misc_feature (1150)..(1150): n is a, c, g, or t
  misc_feature (1163)..(1164): n is a, c, g, or t
  misc_feature (1166)..(1167): n is a, c, g, or t
  misc_feature (1170)..(1170): n is a, c, g, or t
  misc_feature (1174)..(1174): n is a, c, g, or t
  misc_feature (1176)..(1176): n is a, c, g, or t
  misc_feature (1178)..(1178): n is a, c, g, or t
  misc_feature (1180)..(1180): n is a, c, g, or t
  misc_feature (1189)..(1189): n is a, c, g, or t
  misc_feature (1192)..(1192): n is a, c, g, or t
  misc_feature (1195)..(1195): n is a, c, g, or t
  misc_feature (1197)..(1197): n is a, c, g, or t
  misc_feature (1204)..(1204): n is a, c, g, or t
  misc_feature (1206)..(1208): n is a, c, g, or t
  misc_feature (1213)..(1213): n is a, c, g, or t
  misc_feature (1221)..(1221): n is a, c, g, or t
  misc_feature (1223)..(1223): n is a, c, g, or t
  misc_feature (1227)..(1232): n is a, c, g, or t
  misc_feature (1245)..(1245): n is a, c, g, or t
  misc_feature (1247)..(1247): n is a, c, g, or t
  misc_feature (1249)..(1251): n is a, c, g, or t
  misc_feature (1253)..(1256): n is a, c, g, or t
  misc_feature (1258)..(1260): n is a, c, g, or t
  misc_feature (1265)..(1265): n is a, c, g, or t
  misc_feature (1267)..(1267): n is a, c, g, or t
  misc_feature (1274)..(1274): n is a, c, g, or t
  misc_feature (1290)..(1291): n is a, c, g, or t
  misc_feature (1294)..(1295): n is a, c, g, or t
  misc_feature (1299)..(1299): n is a, c, g, or t
  misc_feature (1302)..(1302): n is a, c, g, or t
  misc_feature (1309)..(1311): n is a, c, g, or t
  misc_feature (1314)..(1314): n is a, c, g, or t
  misc_feature (1316)..(1316): n is a, c, g, or t
  misc_feature (1331)..(1331): n is a, c, g, or t
  misc_feature (1334)..(1334): n is a, c, g, or t
  misc_feature (1336)..(1337): n is a, c, g, or t
  misc_feature (1342)..(1342): n is a, c, g, or t
  misc_feature (1352)..(1355): n is a, c, g, or t
  misc_feature (1357)..(1361): n is a, c, g, or t
  misc_feature (1373)..(1375): n is a, c, g, or t
  misc_feature (1380)..(1380): n is a, c, g, or t
  misc_feature (1382)..(1382): n is a, c, g, or t
  misc_feature (1384)..(1392): n is a, c, g, or t
aatnagaganaattactatgagaggatcgcatcaccatcaccatcacggatcctatttaggtgacactatagaatcgtcgacccacgcgtccgcggacgcgtgggcggacgcgtgggattttcccgcgtgcgtgtgtgagtgggtgtgtgtgttttcttacaaagggtatttcgcgatcgatcgattgattcgtagttcccccccgcgcgcctttgccctttgtgctgtaatcgagctcccgccatcccaggtgcttctccgttcctctaaacgccagcgtctggacgtgagcgcaggtcgccggtttgtgccttcggtccccgcttcgccccctgccgtcccctccttatcacggtcccgctcgcggcctcgccgccccgctgtctccgccgcccgccatggcgactgcgacccccgtgccgccgcggatgggcagccgcgctggcggccccaccacgccgctgagccccacgcgcctgtcgcggctccaggagaaggaggagctgcgcgagctcaatgaccggctggcggtgtacatcgacaaggtgcgcagcctggagacgganaacagcgcgctgcanctgcaggtgacggagcgcgaggaggtgcgcggccgtgagctcaccggcctcaaggcgctctacgagaccnagctggccgacgcgcgacgcgcgctcgacgacacggcccgcgagcgcgccaagctgcagatcgagctgggcaagtgcaaggcggaacacgaccagctgctcctcaactatgctaanaaggaaatctgatcttaatggcgcccanatcaancttcnagaatatgaancancactgaaattcnaaaagatgcanctcttgctactgcacttggtganaaaaaaagttttaaanggaaaatttggaagaatctgaangatcaaaattgcccanttggaaaacctccttaacttcanccaaaaaaanatttancaaangaaacntttantnaaaataaatttngaaaaatcnttntnaaaaccttaatgaagaacttngaatttcccaaaaaccatgtatnaaaaggaaaataannaaanccnnangaancttaanncccttngnaaaangggantncnggncntcaaantnaaaaaaanaaaanttgncnaaaccctnntnaaaaaaaaaaaannannccnaatnangntnttaaagaanaantgnanaaaattncnnncaaanttaaaaancnaaannnnnnaaaaaaaaaattnantnnnannnncnnnaaaananaaaaccnaaaaaaaaaaactttnnccnntttnatnaaaaaannnaanantttaaaaaaaaaaanaanannttttnaaaaaaaaannnncnnnnnaaaaaaaaaaannnaaaananannnnnnnnna

SEQ ID NO: 346 - DNA, 256 bp, Homo Sapiens
ccggagccagctctagggcccgtgcaggccacaccatgaacacctccccaggcacggtgggcagtgacccggtcatcctggccactgcaggctacgaccacaccgtgcgcttctggcaggcccacagcggcatctgcacccggacggtgcagcaccaggactcccaggtgaatgccttggaggtcacaccggaccgcagcatgattgctgctgcaggttaccagcacatccgcatgtatgatctcaactccaataa

SEQ ID NO: 347 - DNA, 256 bp, Homo Sapiens
  misc_feature (3)..(3): n is a, c, g, or t
atnagagaaattactatgagaggatcgcatcaccatcaccatcacggatcctatttaggtgacactatagaatcgtcgacccacgcgtccgccaagaacgtgctcttcgctcacctggatgacaacgagaggagtgacatattcgatgccatgttccctgtcactcacatcgctggggagactgttatacagcaagggaatgaaggagacaacttctatgtcgttgatcaaggggaagtggatgtgtacgtgaacg

SEQ ID NO: 348 - DNA, 939 bp, Homo Sapiens
  misc_feature (2)..(5): n is a, c, g, or t
  misc_feature (11)..(11): n is a, c, g, or t
  misc_feature (13)..(13): n is a, c, g, or t
  misc_feature (18)..(18): n is a, c, g, or t
  misc_feature (25)..(26): n is a, c, g, or t
  misc_feature (29)..(29): n is a, c, g, or t
  misc_feature (35)..(35): n is a, c, g, or t
  misc_feature (40)..(40): n is a, c, g, or t
  misc_feature (56)..(56): n is a, c, g, or t
  misc_feature (60)..(60): n is a, c, g, or t
  misc_feature (76)..(77): n is a, c, g, or t
  misc_feature (79)..(79): n is a, c, g, or t
  misc_feature (98)..(98): n is a, c, g, or t
  misc_feature (103)..(103): n is a, c, g, or t
  misc_feature (112)..(112): n is a, c, g, or t
  misc_feature (118)..(118): n is a, c, g, or t
  misc_feature (125)..(125): n is a, c, g, or t
  misc_feature (150)..(150): n is a, c, g, or t
  misc_feature (166)..(166): n is a, c, g, or t
  misc_feature (170)..(170): n is a, c, g, or t
  misc_feature (188)..(188): n is a, c, g, or t
  misc_feature (192)..(192): n is a, c, g, or t
  misc_feature (211)..(211): n is a, c, g, or t
  misc_feature (218)..(218): n is a, c, g, or t
  misc_feature (223)..(223): n is a, c, g, or t
  misc_feature (231)..(231): n is a, c, g, or t
  misc_feature (233)..(233): n is a, c, g, or t
  misc_feature (240)..(240): n is a, c, g, or t
  misc_feature (267)..(267): n is a, c, g, or t
  misc_feature (279)..(279): n is a, c, g, or t
  misc_feature (290)..(290): n is a, c, g, or t
  misc_feature (293)..(293): n is a, c, g, or t
  misc_feature (296)..(296): n is a, c, g, or t
  misc_feature (307)..(308): n is a, c, g, or t
  misc_feature (321)..(321): n is a, c, g, or t
  misc_feature (333)..(333): n is a, c, g, or t
  misc_feature (335)..(335): n is a, c, g, or t
  misc_feature (339)..(341): n is a, c, g, or t
  misc_feature (345)..(345): n is a, c, g, or t
  misc_feature (347)..(348): n is a, c, g, or t
  misc_feature (351)..(351): n is a, c, g, or t
  misc_feature (358)..(358): n is a, c, g, or t
  misc_feature (361)..(361): n is a, c, g, or t
  misc_feature (363)..(364): n is a, c, g, or t
  misc_feature (367)..(367): n is a, c, g, or t
  misc_feature (375)..(375): n is a, c, g, or t
  misc_feature (383)..(383): n is a, c, g, or t
  misc_feature (399)..(399): n is a, c, g, or t
  misc_feature (404)..(404): n is a, c, g, or t
  misc_feature (407)..(407): n is a, c, g, or t
  misc_feature (410)..(410): n is a, c, g, or t
  misc_feature (417)..(417): n is a, c, g, or t
  misc_feature (419)..(419): n is a, c, g, or t
  misc_feature (421)..(421): n is a, c, g, or t
  misc_feature (424)..(424): n is a, c, g, or t
  misc_feature (430)..(430): n is a, c, g, or t
  misc_feature (437)..(437): n is a, c, g, or t
  misc_feature (451)..(451): n is a, c, g, or t
  misc_feature (453)..(454): n is a, c, g, or t
  misc_feature (457)..(458): n is a, c, g, or t
  misc_feature (462)..(462): n is a, c, g, or t
  misc_feature (465)..(465): n is a, c, g, or t
  misc_feature (468)..(468): n is a, c, g, or t
  misc_feature (470)..(470): n is a, c, g, or t
  misc_feature (474)..(474): n is a, c, g, or t
  misc_feature (485)..(486): n is a, c, g, or t
  misc_feature (493)..(493): n is a, c, g, or t
  misc_feature (501)..(501): n is a, c, g, or t
  misc_feature (504)..(504): n is a, c, g, or t
  misc_feature (507)..(507): n is a, c, g, or t
  misc_feature (509)..(510): n is a, c, g, or t
  misc_feature (518)..(518): n is a, c, g, or t
  misc_feature (527)..(527): n is a, c, g, or t
  misc_feature (529)..(529): n is a, c, g, or t
  misc_feature (532)..(532): n is a, c, g, or t
  misc_feature (536)..(536): n is a, c, g, or t
  misc_feature (543)..(543): n is a, c, g, or t
  misc_feature (548)..(549): n is a, c, g, or t
  misc_feature (551)..(551): n is a, c, g, or t
  misc_feature (554)..(554): n is a, c, g, or t
  misc_feature (558)..(558): n is a, c, g, or t
  misc_feature (562)..(564): n is a, c, g, or t
  misc_feature (566)..(566): n is a, c, g, or t
  misc_feature (572)..(573): n is a, c, g, or t
  misc_feature (588)..(589): n is a, c, g, or t
  misc_feature (593)..(593): n is a, c, g, or t
  misc_feature (598)..(598): n is a, c, g, or t
  misc_feature (602)..(602): n is a, c, g, or t
  misc_feature (605)..(606): n is a, c, g, or t
  misc_feature (608)..(608): n is a, c, g, or t
  misc_feature (610)..(610): n is a, c, g, or t
  misc_feature (612)..(612): n is a, c, g, or t
  misc_feature (614)..(615): n is a, c, g, or t
  misc_feature (627)..(627): n is a, c, g, or t
  misc_feature (638)..(638): n is a, c, g, or t
  misc_feature (642)..(642): n is a, c, g, or t
  misc_feature (649)..(649): n is a, c, g, or t
  misc_feature (652)..(652): n is a, c, g, or t
  misc_feature (662)..(662): n is a, c, g, or t
  misc_feature (674)..(674): n is a, c, g, or t
  misc_feature (679)..(679): n is a, c, g, or t
  misc_feature (683)..(683): n is a, c, g, or t
  misc_feature (690)..(691): n is a, c, g, or t
  misc_feature (697)..(697): n is a, c, g, or t
  misc_feature (704)..(704): n is a, c, g, or t
  misc_feature (712)..(712): n is a, c, g, or t
  misc_feature (715)..(715): n is a, c, g, or t
  misc_feature (720)..(720): n is a, c, g, or t
  misc_feature (724)..(724): n is a, c, g, or t
  misc_feature (727)..(730): n is a, c, g, or t
  misc_feature (733)..(733): n is a, c, g, or t
  misc_feature (737)..(737): n is a, c, g, or t
  misc_feature (740)..(741): n is a, c, g, or t
  misc_feature (743)..(743): n is a, c, g, or t
  misc_feature (746)..(746): n is a, c, g, or t
  misc_feature (748)..(748): n is a, c, g, or t
  misc_feature (755)..(758): n is a, c, g, or t
  misc_feature (760)..(760): n is a, c, g, or t
  misc_feature (764)..(764): n is a, c, g, or t
  misc_feature (766)..(766): n is a, c, g, or t
  misc_feature (768)..(768): n is a, c, g, or t
  misc_feature (772)..(772): n is a, c, g, or t
  misc_feature (774)..(774): n is a, c, g, or t
  misc_feature (777)..(777): n is a, c, g, or t
  misc_feature (784)..(784): n is a, c, g, or t
  misc_feature (789)..(789): n is a, c, g, or t
  misc_feature (791)..(792): n is a, c, g, or t
  misc_feature (794)..(794): n is a, c, g, or t
  misc_feature (800)..(800): n is a, c, g, or t
  misc_feature (802)..(802): n is a, c, g, or t
  misc_feature (805)..(805): n is a, c, g, or t
  misc_feature (818)..(819): n is a, c, g, or t
  misc_feature (821)..(821): n is a, c, g, or t
  misc_feature (823)..(823): n is a, c, g, or t
  misc_feature (825)..(826): n is a, c, g, or t
  misc_feature (830)..(830): n is a, c, g, or t
  misc_feature (835)..(835): n is a, c, g, or t
  misc_feature (838)..(839): n is a, c, g, or t
  misc_feature (841)..(841): n is a, c, g, or t
  misc_feature (843)..(843): n is a, c, g, or t
  misc_feature (848)..(848): n is a, c, g, or t
  misc_feature (855)..(857): n is a, c, g, or t
  misc_feature (859)..(860): n is a, c, g, or t
  misc_feature (862)..(863): n is a, c, g, or t
  misc_feature (865)..(866): n is a, c, g, or t
  misc_feature (870)..(870): n is a, c, g, or t
  misc_feature (873)..(873): n is a, c, g, or t
  misc_feature (877)..(877): n is a, c, g, or t
  misc_feature (885)..(885): n is a, c, g, or t
  misc_feature (893)..(895): n is a, c, g, or t
  misc_feature (900)..(900): n is a, c, g, or t
  misc_feature (908)..(909): n is a, c, g, or t
  misc_feature (914)..(914): n is a, c, g, or t
  misc_feature (923)..(924): n is a, c, g, or t
  misc_feature (926)..(926): n is a, c, g, or t
  misc_feature (930)..(930): n is a, c, g, or t
  misc_feature (934)..(934): n is a, c, g, or t
  misc_feature (937)..(937): n is a, c, g, or t
  misc_feature (939)..(939): n is a, c, g, or t
cnnnnaagganantaagnaaattcnnttngggggntcccntccccttccccatccnggtntccttttttgggtganncntttaaaatcgtcgaacccncgcgntccgcgaancaatanagcgaancgacgaggaagggaaggatgtcccngatcatgcggtcttanaaangagagccaacttcccgtngccngatgttggggacttcctgnatgaggntctgntcattgancngcagcgngatgaagcggacaaactattgaggcantactactagganggccgcaaggntgngcnaccccctgaanngcgctttgacaancgaggtggtggngncttnnnggancnntcncgtggtngtngnnccncgctaagntgcgaaancctaggatttcctgtnggccngangcngaggcgntncnctnatcccntacatcnccaggcattcgctngnnctnntagntgnacncnaaanaggatcatctnnctccaancgcgatgnccntgngnntatatatncataaaccnantgntgtntatcaancaaanngnatnattnttcnnncnacttgnnaagcatatatacctnnttcncctcntggngtnnancncnanncaagctaacctnccatcctaaanggcngtccctnttnttcatttaanaaagccatcganatccncatntaatcanncatgtnctcccantccaattntcntatanatgncannnngtnttgnatnncnctnancgccccnnnncncctntncntttnanatnaattatnatacnanntncccacnantcnttccaaatctgcnncntnanngtangcttntcnncntngttgnttctaannntnnanntnntctnctncctnaaaaaatntttttttnnntgctncttctaannccagnaatgtccanngnattntctnaanan

SEQ ID NO: 349 - DNA, 256 bp, Homo Sapiens
  misc_feature (5)..(5): n is a, c, g, or t
  misc_feature (11)..(11): n is a, c, g, or t
  misc_feature (16)..(16): n is a, c, g, or t
  misc_feature (18)..(18): n is a, c, g, or t
  misc_feature (20)..(20): n is a, c, g, or t
  misc_feature (23)..(23): n is a, c, g, or t
  misc_feature (26)..(28): n is a, c, g, or t
  misc_feature (78)..(78): n is a, c, g, or t
  misc_feature (82)..(82): n is a, c, g, or t
tttcntttgtngcggnanantantannngattaattgtagcggatacaatttacacagaattattaagaggagaaatnactntgagaggatcgcataccatcaccatcacggatcctatttaggtgacactatagaatcgtcgacccacgcgtccggatcactgcgaccagaggaaattgaagagctccgagaggccttcagagaattcgacaaggacaaggatggctacatcaactgccgggatctgggcaactg

SEQ ID NO: 350 - DNA, 256 bp, Homo Sapiens
cgatgggcatctctcgggacaactggcacaagcgccgcaaaaccgggggcaagagaaagccctaccacaagaagcggaagtatgagttggggcgcccagctgccaacaccaagattggcccccgccgcatccacacagtccgtgtgcggggaggtaacaagaaataccgtgccctgaggttggacgtggggaatttctcctggggctcagagtgttgtactcgtaaaacaaggatcatcgatgttgtctacaatgc

SEQ ID NO: 351 - DNA, 256 bp, Homo Sapiens
tgcagagcacagtcacaggccacgtagaacgtgcccttgagactcggcacgagcaggaacagcggcggctggagcgagcactggctgaggggcagcagcggggagggcagctgcaggagcagctgacacaacagttgtcccaagcactgtcgtcagctgtagctgggcggctagagcgcagcatacgggatgagatcaagaagacagtccctccatgtgtctcaaggagtctggagcctatggcaggccaactgag

SEQ ID NO: 352 - DNA, 256 bp, Homo Sapiens
  misc_feature (4)..(5): n is a, c, g, or t
  misc_feature (11)..(11): n is a, c, g, or t
  misc_feature (14)..(15): n is a, c, g, or t
  misc_feature (21)..(21): n is a, c, g, or t
  misc_feature (23)..(24): n is a, c, g, or t
  misc_feature (26)..(26): n is a, c, g, or t
  misc_feature (35)..(36): n is a, c, g, or t
  misc_feature (38)..(38): n is a, c, g, or t
  misc_feature (40)..(40): n is a, c, g, or t
  misc_feature (43)..(43): n is a, c, g, or t
  misc_feature (47)..(47): n is a, c, g, or t
  misc_feature (49)..(49): n is a, c, g, or t
  misc_feature (51)..(51): n is a, c, g, or t
  misc_feature (53)..(54): n is a, c, g, or t
  misc_feature (64)..(64): n is a, c, g, or t
  misc_feature (67)..(67): n is a, c, g, or t
  misc_feature (75)..(75): n is a, c, g, or t
  misc_feature (79)..(79): n is a, c, g, or t
  misc_feature (81)..(81): n is a, c, g, or t
  misc_feature (83)..(84): n is a, c, g, or t
  misc_feature (87)..(88): n is a, c, g, or t
  misc_feature (90)..(90): n is a, c, g, or t
  misc_feature (111)..(111): n is a, c, g, or t
  misc_feature (115)..(115): n is a, c, g, or t
  misc_feature (117)..(117): n is a, c, g, or t
  misc_feature (120)..(122): n is a, c, g, or t
  misc_feature (142)..(142): n is a, c, g, or t
  misc_feature (148)..(148): n is a, c, g, or t
  misc_feature (152)..(152): n is a, c, g, or t
  misc_feature (158)..(158): n is a, c, g, or t
  misc_feature (165)..(165): n is a, c, g, or t
  misc_feature (168)..(168): n is a, c, g, or t
  misc_feature (171)..(171): n is a, c, g, or t
  misc_feature (173)..(176): n is a, c, g, or t
  misc_feature (181)..(181): n is a, c, g, or t
  misc_feature (183)..(183): n is a, c, g, or t
  misc_feature (186)..(188): n is a, c, g, or t
  misc_feature (194)..(197): n is a, c, g, or t
  misc_feature (200)..(201): n is a, c, g, or t
  misc_feature (205)..(206): n is a, c, g, or t
  misc_feature (212)..(212): n is a, c, g, or t
  misc_feature (214)..(214): n is a, c, g, or t
  misc_feature (216)..(217): n is a, c, g, or t
  misc_feature (219)..(221): n is a, c, g, or t
  misc_feature (225)..(225): n is a, c, g, or t
  misc_feature (228)..(228): n is a, c, g, or t
  misc_feature (238)..(238): n is a, c, g, or t
  misc_feature (245)..(247): n is a, c, g, or t
  misc_feature (251)..(251): n is a, c, g, or t
  misc_feature (256)..(256): n is a, c, g, or t
cttnngtgtgngtnnaacgcncnnanaaaattaannanangancttntntngnnggggggggantgnccttcaanccancncnnccnntnatggggtggtctatattttgnagtngngcnnnacccacatattatagtgagntccgcncccncaccgnccggccncgnctngnnnnctaangnggnnngctccnnnntanntggnnccggtntncnngnnntatngcntggattccantaagaannnccangaagn

SEQ ID NO: 353 - DNA, 1342 bp, Homo Sapiens
  misc_feature (808)..(808): n is a, c, g, or t
  misc_feature (823)..(823): n is a, c, g, or t
  misc_feature (859)..(859): n is a, c, g, or t
  misc_feature (861)..(861): n is a, c, g, or t
  misc_feature (866)..(866): n is a, c, g, or t
  misc_feature (879)..(879): n is a, c, g, or t
  misc_feature (887)..(887): n is a, c, g, or t
  misc_feature (897)..(897): n is a, c, g, or t
  misc_feature (918)..(918): n is a, c, g, or t
  misc_feature (947)..(947): n is a, c, g, or t
  misc_feature (952)..(952): n is a, c, g, or t
  misc_feature (969)..(969): n is a, c, g, or t
  misc_feature (974)..(974): n is a, c, g, or t
  misc_feature (981)..(981): n is a, c, g, or t
  misc_feature (991)..(991): n is a, c, g, or t
  misc_feature (997)..(997): n is a, c, g, or t
  misc_feature (1014)..(1014): n is a, c, g, or t
  misc_feature (1017)..(1018): n is a, c, g, or t
  misc_feature (1022)..(1022): n is a, c, g, or t
  misc_feature (1034)..(1034): n is a, c, g, or t
  misc_feature (1049)..(1050): n is a, c, g, or t
  misc_feature (1054)..(1054): n is a, c, g, or t
  misc_feature (1057)..(1057): n is a, c, g, or t
  misc_feature (1059)..(1059): n is a, c, g, or t
  misc_feature (1065)..(1065): n is a, c, g, or t
  misc_feature (1074)..(1074): n is a, c, g, or t
  misc_feature (1081)..(1083): n is a, c, g, or t
  misc_feature (1088)..(1089): n is a, c, g, or t
  misc_feature (1096)..(1096): n is a, c, g, or t
  misc_feature (1104)..(1105): n is a, c, g, or t
  misc_feature (1108)..(1108): n is a, c, g, or t
  misc_feature (1112)..(1112): n is a, c, g, or t
  misc_feature (1124)..(1124): n is a, c, g, or t
  misc_feature (1132)..(1132): n is a, c, g, or t
  misc_feature (1136)..(1136): n is a, c, g, or t
  misc_feature (1146)..(1147): n is a, c, g, or t
  misc_feature (1149)..(1149): n is a, c, g, or t
  misc_feature (1151)..(1152): n is a, c, g, or t
  misc_feature (1159)..(1159): n is a, c, g, or t
  misc_feature (1161)..(1161): n is a, c, g, or t
  misc_feature (1165)..(1166): n is a, c, g, or t
  misc_feature (1169)..(1169): n is a, c, g, or t
  misc_feature (1172)..(1172): n is a, c, g, or t
  misc_feature (1192)..(1192): n is a, c, g, or t
  misc_feature (1195)..(1198): n is a, c, g, or t
  misc_feature (1200)..(1201): n is a, c, g, or t
  misc_feature (1208)..(1208): n is a, c, g, or t
  misc_feature (1218)..(1218): n is a, c, g, or t
  misc_feature (1220)..(1223): n is a, c, g, or t
  misc_feature (1225)..(1229): n is a, c, g, or t
  misc_feature (1231)..(1235): n is a, c, g, or t
  misc_feature (1239)..(1244): n is a, c, g, or t
  misc_feature (1247)..(1248): n is a, c, g, or t
  misc_feature (1251)..(1251): n is a, c, g, or t
  misc_feature (1256)..(1259): n is a, c, g, or t
  misc_feature (1263)..(1263): n is a, c, g, or t
  misc_feature (1265)..(1265): n is a, c, g, or t
  misc_feature (1271)..(1271): n is a, c, g, or t
  misc_feature (1273)..(1274): n is a, c, g, or t
  misc_feature (1277)..(1278): n is a, c, g, or t
  misc_feature (1288)..(1292): n is a, c, g, or t
  misc_feature (1296)..(1299): n is a, c, g, or t
  misc_feature (1301)..(1320): n is a, c, g, or t
  misc_feature (1325)..(1328): n is a, c, g, or t
  misc_feature (1333)..(1342): n is a, c, g, or t
tagagaaattactatgagaggatcgcatcaccatcaccatcacggatcctatttaggtgacactatagaatcgtcgacccacgcgtccgggaccaggcagccactttcctggtgctctctgggcccagctggtgctgtagggccacgcaggcaggggcgtcaaggggtttctctgcccaaggaagacagaacatggagaaccgtcagggcaggaaccccacagactgtcccttccagcccacactctgccacctcctggccctgtcccaattctgagccaaggcctccccgaggcagaagttgcctggtcctctgtccccacagtgacctgactgggggtgagggagaaggaggagagagcccatgtgtggtgtgtgtgcccctgagaacttcgtggtgactgcctttgggagcccgcaggtggccagaggcaggggtagctgagttcctggagaccccttttttgcccccaggttccccagagggcaacgccatcagtagcagtgtggtgtttcaggcagagctctggccaggctgtgccagtgtgtcccggacgcatcactaaggaagagagagtttatttagtcaactggcccaaggcagcgaggcttctacagtcccacaccccatagccgcctgggctggggcttactgggggctgaaggttctggacatgaacaagggtcaggtagaagagaaaggcttcccctacaccccagcctcctgctgtcccctgaagcccaggactgcgttgtatgctttccatccactcaccttaccccatagcatcttgcggcccaaaaaccanagccatttgtctcanaccctaaatcaataatcacaaaccccaaaacgggananagcantgaaaacatgcanggctgtgnacgggggaanggttgtggcgggtgttctgangctgaaaagacacctatatgcgtatttcntctanacacatcaccccccttntatantcttaanccatgactancctggnggcgtgtaaatttctgnccnntttnaccccctcatgngcttcttctgaaaanngaangtnantgtttnaaaactggnaaaattnnnccccnnttattgnaaaaaaanntgnaaancttggaaatttntttttttnctgntttccaaagnntncnnaaaaaancnaaannttnaangggggggggggggggggggnaannnngnnccccccngggggggggntnnnngnnnnntnnnnntttnnnnnnggnnaanttttnnnntttntntttttntnnccnnaaaaaaaaannnnntttnnnntnnnnnnnnnnnnnnnnnnnnaaaannnnaaaannnnnnnnnn

SEQ ID NO: 354 - DNA, 256 bp, Homo Sapiens
  misc_feature (26)..(26): n is a, c, g, or t
  misc_feature (111)..(111): n is a, c, g, or t
  misc_feature (238)..(238): n is a, c, g, or t
tcttaagaggagaattaactatgagnaggttcgcatcaccatcaccatcacggatcctatttaggtgacactatagaatcgtcgacccacgcgtccggctgctgcgacagnccactacctttttcgagagtgactcccgttgtcccaaggcttcccagagcgaacctgtgcggctgcaggcaccggcgcgtcgagtttccggcgtccggaaggaccgagctcttctcgcggatccagngttccgtttccagccccc

SEQ ID NO: 355 - DNA, 1357 bp, Homo Sapiens
  misc_feature (1)..(1): n is a, c, g, or t
  misc_feature (3)..(3): n is a, c, g, or t
  misc_feature (888)..(888): n is a, c, g, or t
  misc_feature (897)..(897): n is a, c, g, or t
  misc_feature (900)..(900): n is a, c, g, or t
  misc_feature (938)..(938): n is a, c, g, or t
  misc_feature (949)..(949): n is a, c, g, or t
  misc_feature (969)..(969): n is a, c, g, or t
  misc_feature (974)..(974): n is a, c, g, or t
  misc_feature (978)..(978): n is a, c, g, or t
  misc_feature (999)..(999): n is a, c, g, or t
  misc_feature (1006)..(1006): n is a, c, g, or t
  misc_feature (1009)..(1009): n is a, c, g, or t
  misc_feature (1026)..(1026): n is a, c, g, or t
  misc_feature (1041)..(1041): n is a, c, g, or t
  misc_feature (1057)..(1057): n is a, c, g, or t
  misc_feature (1067)..(1067): n is a, c, g, or t
  misc_feature (1077)..(1077): n is a, c, g, or t
  misc_feature (1083)..(1084): n is a, c, g, or t
  misc_feature (1087)..(1087): n is a, c, g, or t
  misc_feature (1093)..(1094): n is a, c, g, or t
  misc_feature (1098)..(1098): n is a, c, g, or t
  misc_feature (1105)..(1105): n is a, c, g, or t
  misc_feature (1109)..(1109): n is a, c, g, or t
  misc_feature (1116)..(1116): n is a, c, g, or t
  misc_feature (1130)..(1130): n is a, c, g, or t
  misc_feature (1133)..(1133): n is a, c, g, or t
  misc_feature (1138)..(1138): n is a, c, g, or t
  misc_feature (1148)..(1148): n is a, c, g, or t
  misc_feature (1153)..(1153): n is a, c, g, or t
  misc_feature (1156)..(1156): n is a, c, g, or t
  misc_feature (1160)..(1160): n is a, c, g, or t
  misc_feature (1170)..(1170): n is a, c, g, or t
  misc_feature (1174)..(1174): n is a, c, g, or t
  misc_feature (1187)..(1187): n is a, c, g, or t
  misc_feature (1191)..(1192): n is a, c, g, or t
  misc_feature (1198)..(1198): n is a, c, g, or t
  misc_feature (1205)..(1205): n is a, c, g, or t
  misc_feature (1216)..(1216): n is a, c, g, or t
  misc_feature (1223)..(1224): n is a, c, g, or t
  misc_feature (1229)..(1230): n is a, c, g, or t
  misc_feature (1236)..(1236): n is a, c, g, or t
  misc_feature (1241)..(1241): n is a, c, g, or t
  misc_feature (1248)..(1250): n is a, c, g, or t
  misc_feature (1253)..(1255): n is a, c, g, or t
  misc_feature (1265)..(1265): n is a, c, g, or t
  misc_feature (1267)..(1267): n is a, c, g, or t
  misc_feature (1269)..(1270): n is a, c, g, or t
  misc_feature (1277)..(1277): n is a, c, g, or t
  misc_feature (1280)..(1280): n is a, c, g, or t
  misc_feature (1283)..(1283): n is a, c, g, or t
  misc_feature (1292)..(1292): n is a, c, g, or t
  misc_feature (1294)..(1294): n is a, c, g, or t
  misc_feature (1296)..(1297): n is a, c, g, or t
  misc_feature (1303)..(1304): n is a, c, g, or t
  misc_feature (1308)..(1308): n is a, c, g, or t
  misc_feature (1313)..(1313): n is a, c, g, or t
  misc_feature (1318)..(1320): n is a, c, g, or t
  misc_feature (1330)..(1332): n is a, c, g, or t
  misc_feature (1334)..(1334): n is a, c, g, or t
  misc_feature (1340)..(1340): n is a, c, g, or t
  misc_feature (1342)..(1342): n is a, c, g, or t
  misc_feature (1357)..(1357): n is a, c, g, or t
nantagagaaattactatgagaggatcgcatcaccatcaccatcacggatcctatttaggtgacactatagaatcgtcgacccacgcgtccggagagaaaggaaagcgcgaggagccgccgccaccaccagcgcagcagtcctggagctgtgaggagattcgggccgtcaccctgcctcccctgcgtcccgccaccggccgcttctgtcctcggacccattccaacaatctcgtaaaacatggtggattactatgaagttctaggcgtgcagagacatgcctcacccgaggatattaaaaaggcatatcggaaactggcactgaagtggcatccagataaaaatcctgagaataaagaagaagcagagagaaaattcaagcaagtagcggaggcatatgaagtgctgtcggatgctaagaaacgggacatctatgacaaatatggcaaagaaggattaaatggtggaggaggaggtggaagtcattttgacagtccatttgaatttggcttcacattccgtaacccagatgatgtcttcagggaattttttggtggaagggacccattttcatttgacttctttgaagacccttttgaggacttctttgggaatcgaaggggtccccgaggaagcagaagccgagggacggggtcgtttttctctgcgttcagtggatttccgtcttttggaagtggattttcttcttttgatacaggatttacttcatttgggtcactaggtcacgggggcctcacttcattctcttccacgtcatttggtggtagtggcatgggcaacttcaaatcgatatcaacttcaactaaaatggttaatggcagaaaaatcactacaaagagaattgtcgagaacggtcaagaaagagtanaagttgaanaanatggccagttaaagtccttaacaataaatggtaaggancagctgctgcncttggataacaagtaattcnacgcncgcncttaacaaaatgttaaactanaacagcnccntttgaggattaacaggnacattttttttgaanatttcaaacgaactcnactttcatanaattgtaccnaaagtnnttntaaacnnctcntccggancctntatttgncaaaaacttttganttngattnttgggacccnataanagnaccntttttttttngccnttaaaattgtggnaaanncccggnaggcccnttgcttttttntaaaccnnccccnngggaancttgnccctttnnngtnnnaaaaattttncntnnccccccnggnccnttttttttntntnnaaatgnncccnaaggnccccnnngaataaattnnngnaaattntntaaaaattttttttn

SEQ ID NO: 356 - DNA, 1195 bp, Homo Sapiens
  misc_feature (917)..(917): n is a, c, g, or t
  misc_feature (998)..(998): n is a, c, g, or t
  misc_feature (1002)..(1002): n is a, c, g, or t
  misc_feature (1005)..(1005): n is a, c, g, or t
  misc_feature (1026)..(1026): n is a, c, g, or t
  misc_feature (1045)..(1045): n is a, c, g, or t
  misc_feature (1056)..(1056): n is a, c, g, or t
  misc_feature (1063)..(1063): n is a, c, g, or t
  misc_feature (1080)..(1081): n is a, c, g, or t
  misc_feature (1083)..(1083): n is a, c, g, or t
  misc_feature (1095)..(1096): n is a, c, g, or t
  misc_feature (1102)..(1102): n is a, c, g, or t
  misc_feature (1104)..(1104): n is a, c, g, or t
  misc_feature (1124)..(1124): n is a, c, g, or t
  misc_feature (1127)..(1127): n is a, c, g, or t
  misc_feature (1129)..(1129): n is a, c, g, or t
  misc_feature (1170)..(1170): n is a, c, g, or t
  misc_feature (1181)..(1181): n is a, c, g, or t
  misc_feature (1183)..(1183): n is a, c, g, or t
  misc_feature (1186)..(1186): n is a, c, g, or t
tagagaaattactatgagaggatcgcatcaccatcaccatcacggatcctatttaggtgacactatagaatcgtcgacccacgcgtccgcccacgcgtccgcagccatggagcaggcacctccggaccccgagcggcagctccagccggcgcccttggagccgctgggctccccagacgctgggctgggggctgcggtcggcaaggaagcggagggggccggagaagagagctctggggtcgacacgatgacacacaataatttttggttgaagaagatagaaatcagtgtttcagaagcagaaaaacgaactggaagaaatgccatgaacatgcaagaaacatatactgcttacctcattgaaacaaggtcagttgaacataccgatggtcagagtgtcctaacagactcactatggcggcgatatagtgaatttgagttgttgagaagctaccttttagtttactatccacatattgttgtgccacctctgccagaaaaacgggcagaatttgtttggcataaactctctgctgacaacatggatccagattttgtggagaggcgacggattggtttagaaaactttctcttgaggattgcttcacatcccatcctttgtagagacaaaatcttctatctgtttttaacacaggaaggtaactggaaggagactgtgaatgaaactgggtttcagctgaaggcagactccaggttaaaagcgcttaatgcaacattcagagtgaaaaacccagacaagagatttactgaccttaagcactatagtgatgaactgcagtctgtcatctcacatcttcttcgagtcagagctagagtagcagatcgactctatggtgtatataaagtacatgggaattatggtcgagttttcagtgaatggagtgccataaaaaaanaaatgggtgatggactgcaaagtgctggtcatcatatggatgtgtatgcatcttctattgatgatattttggaagatgaanaacnttntgcaaatcagtttaaagagtntctttttttatgcaaaacnttgcgggctgngggcagnaaacttgaacttttgcnntntgacttggaaannggtgcncnggacttaacctccaaaaacnccntngggggaactggtaactgggactgggaaaaattttttttganggaagactacnanccntttgtcaaa

SEQ ID NO: 357 - DNA, 1200 bp, Homo Sapiens
  misc_feature (6)..(6): n is a, c, g, or t
  misc_feature (10)..(10): n is a, c, g, or t
  misc_feature (14)..(15): n is a, c, g, or t
  misc_feature (19)..(20): n is a, c, g, or t
  misc_feature (25)..(25): n is a, c, g, or t
  misc_feature (27)..(27): n is a, c, g, or t
  misc_feature (32)..(32): n is a, c, g, or t
  misc_feature (40)..(41): n is a, c, g, or t
  misc_feature (49)..(49): n is a, c, g, or t
  misc_feature (61)..(61): n is a, c, g, or t
  misc_feature (69)..(69): n is a, c, g, or t
  misc_feature (83)..(83): n is a, c, g, or t
  misc_feature (90)..(92): n is a, c, g, or t
  misc_feature (95)..(95): n is a, c, g, or t
  misc_feature (97)..(99): n is a, c, g, or t
  misc_feature (101)..(101): n is a, c, g, or t
  misc_feature (113)..(113): n is a, c, g, or t
  misc_feature (131)..(131): n is a, c, g, or t
  misc_feature (138)..(139): n is a, c, g, or t
  misc_feature (185)..(185): n is a, c, g, or t
  misc_feature (195)..(195): n is a, c, g, or t
  misc_feature (202)..(202): n is a, c, g, or t
  misc_feature (207)..(207): n is a, c, g, or t
  misc_feature (247)..(247): n is a, c, g, or t
  misc_feature (252)..(252): n is a, c, g, or t
  misc_feature (262)..(262): n is a, c, g, or t
  misc_feature (268)..(268): n is a, c, g, or t
  misc_feature (282)..(282): n is a, c, g, or t
  misc_feature (288)..(288): n is a, c, g, or t
  misc_feature (309)..(310): n is a, c, g, or t
  misc_feature (313)..(313): n is a, c, g, or t
  misc_feature (319)..(319): n is a, c, g, or t
  misc_feature (321)..(321): n is a, c, g, or t
  misc_feature (342)..(342): n is a, c, g, or t
  misc_feature (347)..(347): n is a, c, g, or t
  misc_feature (365)..(365): n is a, c, g, or t
  misc_feature (368)..(368): n is a, c, g, or t
  misc_feature (375)..(375): n is a, c, g, or t
  misc_feature (386)..(386): n is a, c, g, or t
  misc_feature (397)..(397): n is a, c, g, or t
  misc_feature (415)..(415): n is a, c, g, or t
  misc_feature (430)..(430): n is a, c, g, or t
  misc_feature (448)..(448): n is a, c, g, or t
  misc_feature (451)..(452): n is a, c, g, or t
  misc_feature (463)..(463): n is a, c, g, or t
  misc_feature (469)..(469): n is a, c, g, or t
  misc_feature (479)..(480): n is a, c, g, or t
  misc_feature (484)..(485): n is a, c, g, or t
  misc_feature (492)..(492): n is a, c, g, or t
  misc_feature (494)..(494): n is a, c, g, or t
  misc_feature (500)..(500): n is a, c, g, or t
  misc_feature (509)..(509): n is a, c, g, or t
  misc_feature (516)..(516): n is a, c, g, or t
  misc_feature (522)..(522): n is a, c, g, or t
  misc_feature (529)..(529): n is a, c, g, or t
  misc_feature (534)..(535): n is a, c, g, or t
  misc_feature (546)..(546): n is a, c, g, or t
  misc_feature (562)..(562): n is a, c, g, or t
  misc_feature (566)..(566): n is a, c, g, or t
  misc_feature (568)..(569): n is a, c, g, or t
  misc_feature (575)..(575): n is a, c, g, or t
  misc_feature (581)..(581): n is a, c, g, or t
  misc_feature (589)..(589): n is a, c, g, or t
  misc_feature (593)..(593): n is a, c, g, or t
  misc_feature (600)..(600): n is a, c, g, or t
  misc_feature (602)..(602): n is a, c, g, or t
  misc_feature (606)..(606): n is a, c, g, or t
  misc_feature (609)..(609): n is a, c, g, or t
  misc_feature (614)..(614): n is a, c, g, or t
  misc_feature (620)..(620): n is a, c, g, or t
  misc_feature (628)..(628): n is a, c, g, or t
  misc_feature (636)..(636): n is a, c, g, or t
  misc_feature (639)..(639): n is a, c, g, or t
  misc_feature (651)..(651): n is a, c, g, or t
  misc_feature (660)..(660): n is a, c, g, or t
  misc_feature (669)..(669): n is a, c, g, or t
  misc_feature (671)..(671): n is a, c, g, or t
  misc_feature (678)..(679): n is a, c, g, or t
  misc_feature (685)..(686): n is a, c, g, or t
  misc_feature (689)..(690): n is a, c, g, or t
  misc_feature (702)..(702): n is a, c, g, or t
  misc_feature (704)..(705): n is a, c, g, or t
  misc_feature (709)..(710): n is a, c, g, or t
  misc_feature (714)..(715): n is a, c, g, or t
  misc_feature (717)..(718): n is a, c, g, or t
  misc_feature (727)..(728): n is a, c, g, or t
  misc_feature (730)..(730): n is a, c, g, or t
  misc_feature (732)..(734): n is a, c, g, or t
  misc_feature (736)..(737): n is a, c, g, or t
  misc_feature (741)..(742): n is a, c, g, or t
  misc_feature (753)..(753): n is a, c, g, or t
  misc_feature (757)..(760): n is a, c, g, or t
  misc_feature (762)..(762): n is a, c, g, or t
  misc_feature (764)..(764): n is a, c, g, or t
  misc_feature (774)..(774): n is a, c, g, or t
  misc_feature (776)..(776): n is a, c, g, or t
  misc_feature (778)..(778): n is a, c, g, or t
  misc_feature (782)..(782): n is a, c, g, or t
  misc_feature (785)..(785): n is a, c, g, or t
  misc_feature (790)..(791): n is a, c, g, or t
  misc_feature (793)..(793): n is a, c, g, or t
  misc_feature (795)..(795): n is a, c, g, or t
  misc_feature (798)..(799): n is a, c, g, or t
  misc_feature (801)..(802): n is a, c, g, or t
  misc_feature (805)..(805): n is a, c, g, or t
  misc_feature (808)..(810): n is a, c, g, or t
  misc_feature (812)..(812): n is a, c, g, or t
  misc_feature (816)..(816): n is a, c, g, or t
  misc_feature (828)..(828): n is a, c, g, or t
  misc_feature (831)..(831): n is a, c, g, or t
  misc_feature (834)..(834): n is a, c, g, or t
  misc_feature (841)..(842): n is a, c, g, or t
  misc_feature (848)..(848): n is a, c, g, or t
  misc_feature (851)..(851): n is a, c, g, or t
  misc_feature (856)..(857): n is a, c, g, or t
  misc_feature (859)..(863): n is a, c, g, or t
  misc_feature (865)..(867): n is a, c, g, or t
  misc_feature (869)..(869): n is a, c, g, or t
  misc_feature (871)..(873): n is a, c, g, or t
  misc_feature (875)..(877): n is a, c, g, or t
  misc_feature (883)..(883): n is a, c, g, or t
  misc_feature (887)..(887): n is a, c, g, or t
  misc_feature (889)..(889): n is a, c, g, or t
  misc_feature (893)..(894): n is a, c, g, or t
  misc_feature (915)..(916): n is a, c, g, or t
  misc_feature (922)..(922): n is a, c, g, or t
  misc_feature (927)..(927): n is a, c, g, or t
  misc_feature (930)..(930): n is a, c, g, or t
  misc_feature (936)..(936): n is a, c, g, or t
  misc_feature (938)..(939): n is a, c, g, or t
  misc_feature (944)..(945): n is a, c, g, or t
  misc_feature (947)..(948): n is a, c, g, or t
  misc_feature (952)..(952): n is a, c, g, or t
  misc_feature (956)..(956): n is a, c, g, or t
  misc_feature (959)..(959): n is a, c, g, or t
  misc_feature (961)..(961): n is a, c, g, or t
  misc_feature (963)..(963): n is a, c, g, or t
  misc_feature (969)..(969): n is a, c, g, or t
  misc_feature (973)..(974): n is a, c, g, or t
  misc_feature (983)..(983): n is a, c, g, or t
  misc_feature (988)..(988): n is a, c, g, or t
  misc_feature (990)..(990): n is a, c, g, or t
  misc_feature (992)..(994): n is a, c, g, or t
  misc_feature (996)..(996): n is a, c, g, or t
  misc_feature (998)..(998): n is a, c, g, or t
  misc_feature (1000)..(1000): n is a, c, g, or t
  misc_feature (1002)..(1003): n is a, c, g, or t
  misc_feature (1007)..(1007): n is a, c, g, or t
  misc_feature (1011)..(1014): n is a, c, g, or t
  misc_feature (1017)..(1017): n is a, c, g, or t
  misc_feature (1019)..(1019): n is a, c, g, or t
  misc_feature (1022)..(1023): n is a, c, g, or t
  misc_feature (1037)..(1037): n is a, c, g, or t
  misc_feature (1039)..(1040): n is a, c, g, or t
  misc_feature (1046)..(1046): n is a, c, g, or t
  misc_feature (1050)..(1050): n is a, c, g, or t
  misc_feature (1053)..(1053): n is a, c, g, or t
  misc_feature (1055)..(1056): n is a, c, g, or t
  misc_feature (1059)..(1062): n is a, c, g, or t
  misc_feature (1067)..(1069): n is a, c, g, or t
  misc_feature (1074)..(1074): n is a, c, g, or t
  misc_feature (1078)..(1078): n is a, c, g, or t
  misc_feature (1088)..(1088): n is a, c, g, or t
  misc_feature (1106)..(1106): n is a, c, g, or t
  misc_feature (1109)..(1109): n is a, c, g, or t
  misc_feature (1114)..(1118): n is a, c, g, or t
  misc_feature (1120)..(1120): n is a, c, g, or t
  misc_feature (1122)..(1122): n is a, c, g, or t
  misc_feature (1128)..(1128): n is a, c, g, or t
  misc_feature (1136)..(1136): n is a, c, g, or t
  misc_feature (1141)..(1141): n is a, c, g, or t
  misc_feature (1147)..(1147): n is a, c, g, or t
  misc_feature (1149)..(1149): n is a, c, g, or t
  misc_feature (1151)..(1152): n is a, c, g, or t
  misc_feature (1154)..(1154): n is a, c, g, or t
  misc_feature (1166)..(1166): n is a, c, g, or t
  misc_feature (1169)..(1169): n is a, c, g, or t
  misc_feature (1171)..(1171): n is a, c, g, or t
  misc_feature (1173)..(1174): n is a, c, g, or t
  misc_feature (1176)..(1176): n is a, c, g, or t
  misc_feature (1185)..(1186): n is a, c, g, or t
  misc_feature (1188)..(1190): n is a, c, g, or t
  misc_feature (1193)..(1194): n is a, c, g, or t
  misc_feature (1196)..(1197): n is a, c, g, or t
  misc_feature (1199)..(1199): n is a, c, g, or t
aaaaanatanaagnnaaanntattntngtggngggggtcnncatctccntccaccatgtcnggtatatntattttatggaggncactatnnnaancnnncncacccccgacgntccgatggcgttgaatgncttcacnngaaagttctccgcgtcccagcacatgggttccctcggcttcctgcntcggaagcgnatcagcnggcancgtgggaaggtgaagagcttccctaaggatgacccatccnagccngtccacctcncagccntcctgggatacatngctggnatgactcacatcgtgcggganntcnacaggncnggatccaaggtgaacaagaangaggnggcggatgctgtgaccantgnacagacnccacccatggnggttgtgggcnttgtgggctacgaggaancccctcaaggcctcnggaccttcaagactgtcnttnntgatcacatcngtgatnaatgcaaganncgtnnctataananttggcntatatctangaataangccttnaccaagnactgnnagaaatggcangatgaggatggccaanaagnannttgganaagganttcatcancatnaagaaanantgcnaantcatncgtgtnattggtcnaaactcanacncgcgcctgcttnctctgcganaaaataacngnccacttnnatgcannatnncaatgtgaacgnannttcnntatnncnncaataagcnngnannnanncccnncatattcgctngatnnnncnanggttcccccntncntccnaangtttnngnantcnnannaanatnnntnttangtcattcctggnctnctnataaagnnccatangcncacanntnnnnngnnnancnnntnnnttttgnttantncccnnaaaaaattgtactcctacaannaactcnacaanagnttcttntnntaaannanntttntttngananantttgcnattnncaattcctntcatncnannnanancntnntctntttnnnnacncnctnngttaaaaaattctngnnaacccntctncananncannnntattnnnacaanaatntaatcttaantcttttttccttcaaggnctntcctnnnnntntnggaagntgtcaaanttacnaaatanancnnantcctttctactnttnananntnacacctaanncnnnacnnannana

SEQ ID NO: 358 - DNA, 1402 bp, Homo Sapiens
  misc_feature (965)..(965): n is a, c, g, or t
  misc_feature (978)..(978): n is a, c, g, or t
  misc_feature (998)..(998): n is a, c, g, or t
  misc_feature (1004)..(1004): n is a, c, g, or t
  misc_feature (1009)..(1009): n is a, c, g, or t
  misc_feature (1025)..(1025): n is a, c, g, or t
  misc_feature (1035)..(1035): n is a, c, g, or t
  misc_feature (1043)..(1043): n is a, c, g, or t
  misc_feature (1048)..(1048): n is a, c, g, or t
  misc_feature (1050)..(1050): n is a, c, g, or t
  misc_feature (1053)..(1053): n is a, c, g, or t
  misc_feature (1061)..(1061): n is a, c, g, or t
  misc_feature (1065)..(1065): n is a, c, g, or t
  misc_feature (1068)..(1068): n is a, c, g, or t
  misc_feature (1075)..(1075): n is a, c, g, or t
  misc_feature (1107)..(1107): n is a, c, g, or t
  misc_feature (1117)..(1117): n is a, c, g, or t
  misc_feature (1131)..(1131): n is a, c, g, or t
  misc_feature (1136)..(1136): n is a, c, g, or t
  misc_feature (1140)..(1140): n is a, c, g, or t
  misc_feature (1142)..(1142): n is a, c, g, or t
  misc_feature (1145)..(1145): n is a, c, g, or t
  misc_feature (1150)..(1150): n is a, c, g, or t
  misc_feature (1154)..(1154): n is a, c, g, or t
  misc_feature (1158)..(1158): n is a, c, g, or t
  misc_feature (1162)..(1162): n is a, c, g, or t
  misc_feature (1168)..(1168): n is a, c, g, or t
  misc_feature (1172)..(1172): n is a, c, g, or t
  misc_feature (1180)..(1180): n is a, c, g, or t
  misc_feature (1183)..(1183): n is a, c, g, or t
  misc_feature (1193)..(1194): n is a, c, g, or t
  misc_feature (1201)..(1201): n is a, c, g, or t
  misc_feature (1219)..(1219): n is a, c, g, or t
  misc_feature (1240)..(1240): n is a, c, g, or t
  misc_feature (1246)..(1246): n is a, c, g, or t
  misc_feature (1248)..(1248): n is a, c, g, or t
  misc_feature (1261)..(1261): n is a, c, g, or t
  misc_feature (1263)..(1263): n is a, c, g, or t
  misc_feature (1272)..(1272): n is a, c, g, or t
  misc_feature (1278)..(1278): n is a, c, g, or t
  misc_feature (1280)..(1280): n is a, c, g, or t
  misc_feature (1296)..(1296): n is a, c, g, or t
  misc_feature (1300)..(1300): n is a, c, g, or t
  misc_feature (1305)..(1305): n is a, c, g, or t
  misc_feature (1314)..(1314): n is a, c, g, or t
  misc_feature (1316)..(1316): n is a, c, g, or t
  misc_feature (1323)..(1323): n is a, c, g, or t
  misc_feature (1325)..(1325): n is a, c, g, or t
  misc_feature (1335)..(1335): n is a, c, g, or t
  misc_feature (1337)..(1337): n is a, c, g, or t
  misc_feature (1341)..(1341): n is a, c, g, or t
  misc_feature (1364)..(1364): n is a, c, g, or t
  misc_feature (1366)..(1366): n is a, c, g, or t
  misc_feature (1376)..(1377): n is a, c, g, or t
  misc_feature (1388)..(1388): n is a, c, g, or t
  misc_feature (1391)..(1391): n is a, c, g, or t
  misc_feature (1396)..(1396): n is a, c, g, or t
  misc_feature (1401)..(1402): n is a, c, g, or t
tagagaaattaactatggagaggatcgcatcaccatcaccatcacggatcctatttaggtgacactatagaatcgtcgacccacgcgtccggtgaatccttctcaggccaagcagaatccactaaagggaaaaaggaaagaaactctcaaaaatgttcctttctctgaacttaacttaaagaagaaaaaggggaaaacttccactcctcgtggtgttgagggagaactatcttttgtgacattggatgagattggggaagaggaagatgcagctgcacatctagcacaagctctagtcactgtggatgaagtaattgatgaagaagaactaaatatggaagaaatggtaaaaaattcaaattcactttttacattagatgaattaattgaccaagatgattgcatttcccacagtgaacctaaagatgttactgttctgtcagtggctgaagaacaagatctcctcaaacaggaacgcttggtaactgtggatgaaattggagaagtggaagagctacctttgaatgagtcagcagacataacttttgccactttaaatactaaaggaaatgaaggagatactgtaagggattccattggcttcatttcttctcaggtgcccgaagacccttctactttagttactgtagatgaaatacaagatgacagcagtgatttgcatttagtgactttggatgaagtaactgaagaggatgaagactctctggcggattttaacaaccttaaagaagagcttaattttgttactgttgatgaagttggagaggaggaagatggagataatgatttaaaagttgagttagcacaaagcaaaaatgaccatcccacagataaaaaagggaatagaaagaagagagctgtggacacaaaaaaagacaaaacttgaatccttgtcccaagtgggtccagtaatgagaatgttatggaagaagatctaaaaaccntgattgaaagacncttacagctaaactccaccnagagantagantgggaaaactctgccntccaaaaaancctgttgngaccnanccnccaaaggngaanagnccttccnaaagatggagttgatgaggaatctggattaanggattccaanccgagcgaaacccnagaanactnanacnctctnccgncaantcanggcccngagncccggagnaanaactttctgnnccaaggnggatctccgcccattgtncccccccccccgggaaaccangcaaancngcaaaaacccccnancaaaactgnaattcngnccccaaaaggaaaggncaangggcnaaaaaaccntnggtgggnanaaatcccaantntggnccgtttgtttttttttttttttntncaaaaattgnnaatttttcccnaanagggnaaagnn

SEQ ID NO: 359 - DNA, 1200 bp, Homo Sapiens
  misc_feature (69)..(69): n is a, c, g, or t
  misc_feature (847)..(847): n is a, c, g, or t
  misc_feature (898)..(898): n is a, c, g, or t
  misc_feature (903)..(903): n is a, c, g, or t
  misc_feature (910)..(910): n is a, c, g, or t
  misc_feature (934)..(934): n is a, c, g, or t
  misc_feature (939)..(939): n is a, c, g, or t
  misc_feature (945)..(945): n is a, c, g, or t
  misc_feature (955)..(955): n is a, c, g, or t
  misc_feature (968)..(968): n is a, c, g, or t
  misc_feature (973)..(973): n is a, c, g, or t
  misc_feature (979)..(979): n is a, c, g, or t
  misc_feature (989)..(989): n is a, c, g, or t
  misc_feature (999)..(999): n is a, c, g, or t
  misc_feature (1004)..(1004): n is a, c, g, or t
  misc_feature (1006)..(1006): n is a, c, g, or t
  misc_feature (1019)..(1020): n is a, c, g, or t
  misc_feature (1023)..(1023): n is a, c, g, or t
  misc_feature (1026)..(1026): n is a, c, g, or t
  misc_feature (1028)..(1028): n is a, c, g, or t
  misc_feature (1030)..(1030): n is a, c, g, or t
  misc_feature (1051)..(1051): n is a, c, g, or t
  misc_feature (1059)..(1059): n is a, c, g, or t
  misc_feature (1065)..(1065): n is a, c, g, or t
  misc_feature (1068)..(1069): n is a, c, g, or t
  misc_feature (1071)..(1071): n is a, c, g, or t
  misc_feature (1073)..(1074): n is a, c, g, or t
  misc_feature (1076)..(1076): n is a, c, g, or t
  misc_feature (1084)..(1084): n is a, c, g, or t
  misc_feature (1090)..(1090): n is a, c, g, or t
  misc_feature (1099)..(1099): n is a, c, g, or t
  misc_feature (1101)..(1101): n is a, c, g, or t
  misc_feature (1105)..(1105): n is a, c, g, or t
  misc_feature (1119)..(1119): n is a, c, g, or t
  misc_feature (1128)..(1128): n is a, c, g, or t
  misc_feature (1131)..(1132): n is a, c, g, or t
  misc_feature (1138)..(1138): n is a, c, g, or t
  misc_feature (1143)..(1143): n is a, c, g, or t
  misc_feature (1146)..(1146): n is a, c, g, or t
  misc_feature (1150)..(1150): n is a, c, g, or t
  misc_feature (1152)..(1155): n is a, c, g, or t
  misc_feature (1159)..(1159): n is a, c, g, or t
  misc_feature (1163)..(1164): n is a, c, g, or t
  misc_feature (1167)..(1167): n is a, c, g, or t
  misc_feature (1172)..(1173): n is a, c, g, or t
  misc_feature (1179)..(1179): n is a, c, g, or t
  misc_feature (1188)..(1188): n is a, c, g, or t
  misc_feature (1190)..(1190): n is a, c, g, or t
  misc_feature (1193)..(1193): n is a, c, g, or t
  misc_feature (1196)..(1196): n is a, c, g, or t
  misc_feature (1200)..(1200): n is a, c, g, or t
ttagagaaattactatgagaggatcgcatcaccatcaccatcacggatcctatttaggtgacactatantaatcgtcgacccacgcgtccggcccgagcggagcgccgcacgttcccaaccgcgaggccagacatctgactgttggtgtgagaccagtgctcctggtggtgtgccctgagccatggaggcgcctttgcagacagagatggtggagctggtgcccaatggcaaacactcagaggggctgctcccggtcatcacccccatggcaggcaaccagagggtcgaggaccctgcacggagctgtatggagggcaagagcttcctacagaaaagtcccagcaaggagccacacttcactgacttcgaggggaagacatcattcgggatgtcagtgttcaacctcagcaatgccatcatgggcagcggcatcctgggactcgcctatgccatggccaatacgggcattatccttttcctgttcctgttgacagctgtcgccttgctctccagctactccatccacctgctactcaagtcctcaggggtcgtgggcatccgtgcctatgagcagctgggctaccgtgcctttgggaccccaggaaagctggcagcagccctggccatcacgctccagaacatcggagccatgtccagctacctgtacatcatcaagtctgagctgccacttgtcatacagaccttcctgaacctggaggagaaaacctcggactggtacatgaacgggaactacctggtaatccttgtctctgtcaccatcattctgcccctggcactgatgcggcagcttggctacctgggctactccagcggcttctctcttanctgcatggtgttcttcctaattgcagtcatctacaaaaaagttccacgtgncctgnccactgncccccaacttcaaaaacaccacanggaantttcancccacgtggnaaatcgtgaaagnaaaangtgcanctgcaggtcnagcctgaggnttcancnttttgcatcccanntanttnangntcaattcaaaaaagcataacnatcccatnatggcnttnncntnntntgcacccnaggggngcccatttnantgantcaaggaccccccnaaaaaaaanggnnaaattnccaancgnccancnnnncagnaaannagnaattnngggggnccctttggnanctnacntttn

SEQ ID NO: 360 - DNA, 1198 bp, Homo Sapiens
  misc_feature (1)..(1): n is a, c, g, or t
  misc_feature (936)..(936): n is a, c, g, or t
  misc_feature (974)..(974): n is a, c, g, or t
  misc_feature (976)..(976): n is a, c, g, or t
  misc_feature (1009)..(1009): n is a, c, g, or t
  misc_feature (1012)..(1012): n is a, c, g, or t
  misc_feature (1016)..(1018): n is a, c, g, or t
  misc_feature (1020)..(1031): n is a, c, g, or t
  misc_feature (1033)..(1040): n is a, c, g, or t
  misc_feature (1043)..(1045): n is a, c, g, or t
  misc_feature (1047)..(1050): n is a, c, g, or t
  misc_feature (1059)..(1059): n is a, c, g, or t
  misc_feature (1076)..(1076): n is a, c, g, or t
  misc_feature (1086)..(1086): n is a, c, g, or t
  misc_feature (1104)..(1104): n is a, c, g, or t
  misc_feature (1107)..(1107): n is a, c, g, or t
  misc_feature (1110)..(1110): n is a, c, g, or t
  misc_feature (1124)..(1124): n is a, c, g, or t
  misc_feature (1131)..(1132): n is a, c, g, or t
  misc_feature (1143)..(1143): n is a, c, g, or t
  misc_feature (1151)..(1151): n is a, c, g, or t
  misc_feature (1184)..(1184): n is a, c, g, or t
  misc_feature (1186)..(1186): n is a, c, g, or t
  misc_feature (1195)..(1195): n is a, c, g, or t
naattagagaaattaactatgagaggatcgcatcaccatcaccatcacggatcctatttaggtgacactatagaatcgtcgacccacgcgtccgcccacgcgtccgctaagatggaagcgtttttggggtcgcggtccggactttgggcggggggtccggccccaggacagttttaccgcattccatccactcccgattccttcatggatccggcgtctgcactttacagaggtccaatcacgcggacccagaaccccatggtgaccgggacctcagtcctcggcgttaagttcgagggcggagtggtgattgccgcagacatgctgggatcctacggctccttggctcgtttccgcaacatctctcgcattatgcgagtcaacaacagtaccatgctgggtgcctctggcgactacgctgatttccagtatttgaagcaagttctcggccagatggtgattgatgaggagcttctgggagatggacacagctatagtcctagagctattcattcatggctgaccagggccatgtacagccggcgctcgaagatgaaccctttgtggaacaccatggtcatcggaggctatgctgatggagagagcttcctcggttatgtggacatgcttggtgtagcctatgaagccccttcgctggccactggttatggtgcatacttggctcagcctctgctgcgagaagttctggagaagcagccagtgctaagccagaccgaggcccgcgacttagtagaacgctgcatgcgagtgctgtactaccgagatgcccgttcttacaaccggtttcaaatcgccactgtcaccgaaaaaggtgttgaaatagagggaccattgtctacagagaccaactgggatattgcccacatgatcagtggctttgaatgaaatacagatgcattatccagaactgaagtngccctacttttaactttgaacttggctagttcaaagananactcttccttttgtaaagtaaataaattcttcnaantggnnnannnnnnnnnnnnannnnnnnnaannnannnnggggggggnccctccctaaagggagncgaataaacnttaattaactgaactggnacnccngttgaaaaatccanaaagacnncaaaacccctntggatttnttcaaaacccccggttgcccccggggttttttntnggggaaaancca

SEQ ID NO: 361 - DNA, 256 bp, Homo Sapiens
  misc_feature (2)..(4): n is a, c, g, or t
tnnnaggagaattaactatgagaggatcgcatcaccatcaccatcacggatcctatttaggtgacactatagaatcgtcgacccacgcgtccgtagctattaattcaaaaaaggaggaactcaatcaatctgtaaatcgtgtgaaagaacttgagcttgaattagagtctgtcaaagcccagtctttggcaataacaaaacaaaaccatatgctgaatgaaaaggttaaagagatgagtgattattcactactaaa

SEQ ID NO: 362 - DNA, 1200 bp, Homo Sapiens
  misc_feature (4)..(4): n is a, c, g, or t
  misc_feature (936)..(936): n is a, c, g, or t
  misc_feature (955)..(955): n is a, c, g, or t
  misc_feature (959)..(959): n is a, c, g, or t
  misc_feature (997)..(997): n is a, c, g, or t
  misc_feature (1009)..(1009): n is a, c, g, or t
  misc_feature (1011)..(1011): n is a, c, g, or t
  misc_feature (1034)..(1034): n is a, c, g, or t
  misc_feature (1036)..(1036): n is a, c, g, or t
  misc_feature (1040)..(1040): n is a, c, g, or t
  misc_feature (1053)..(1054): n is a, c, g, or t
  misc_feature (1058)..(1058): n is a, c, g, or t
  misc_feature (1062)..(1062): n is a, c, g, or t
  misc_feature (1092)..(1092): n is a, c, g, or t
  misc_feature (1095)..(1095): n is a, c, g, or t
  misc_feature (1099)..(1099): n is a, c, g, or t
  misc_feature (1113)..(1113): n is a, c, g, or t
  misc_feature (1117)..(1117): n is a, c, g, or t
  misc_feature (1136)..(1136): n is a, c, g, or t
  misc_feature (1138)..(1139): n is a, c, g, or t
  misc_feature (1141)..(1141): n is a, c, g, or t
  misc_feature (1144)..(1144): n is a, c, g, or t
  misc_feature (1148)..(1148): n is a, c, g, or t
  misc_feature (1150)..(1150): n is a, c, g, or t
  misc_feature (1158)..(1158): n is a, c, g, or t
  misc_feature (1163)..(1163): n is a, c, g, or t
  misc_feature (1166)..(1166): n is a, c, g, or t
  misc_feature (1168)..(1168): n is a, c, g, or t
  misc_feature (1171)..(1171): n is a, c, g, or t
  misc_feature (1173)..(1173): n is a, c, g, or t
  misc_feature (1178)..(1178): n is a, c, g, or t
  misc_feature (1180)..(1180): n is a, c, g, or t
  misc_feature (1189)..(1189): n is a, c, g, or t
  misc_feature (1200)..(1200): n is a, c, g, or t
aatngagaaattactatgagaggatcgcatcaccatcaccatcacggatcctatttaggtgacactatagaatcgtcgacccacgcgtccgctggcggtgaacatggtgcccttccctcgcctgcacttcttcatgcccggcttcgcgcccctgaccagccggggcagccagcagtaccgggcgctcacggtgcccgagctcacccagcagatgttcgactccaagaacatgatggccgcctgcgacccgcgccacggccgctacctgacggtggctgccatcttccggggccgcatgtccatgaaggaggtggacgagcagatgctcaacgtgcagaacaagaacagcagctacttcgtggagtggatccccaacaacgtgaagacggccgtgtgcgacatcccgccccgcggcctgaagatgtcggccaccttcatcggcaacagcacggccatccaggagctgttcaagcgcatctccgagcagttcacggccatgttccggcgcaaggccttcctgcactggtacacgggcgagggcatggacgagatggagttcaccgaggccgagagcaacatgaacgacctggtgtccgagtaccagcagtaccaggacgccacggccgacgaacaaggggagttcgaggaggaggagggcgaggacgaggcttaaaaacttctcagatcaatcgtgcatccttagtgaacttctgttgtcctcaagcatggtctttctacttgtaaactatggtgctcagttttgcctctgttagaaattcacactgttgatgtaatgatgtggaactcctctaaaaattacagtattgtctgtgaaggtatctatactaataaaaaagcatgtgtagaaaaaaaaaaaaaaaaaaaaaaagggcggccgctccctatagtgagtcgtattaagcttaattaactgancttggactcctgttgatanatcnagtaatgacctcaaaactccatctggatttgttcaaangctcggttgccncnggcgttttttttggtgaaaatcnanctancttggcgaatttnngganctanggaactaaatggaaaaaaaatcctggaatnccncgtnaaaattccaatggnatcnaaaaaaattttgaggattnanncnttnccangnactaaacnaaacnttnantgnantaagncnttttaaaangaaaaaaaaan

SEQ ID NO: 363 - DNA, 256 bp, Homo Sapiens
  misc_feature (6)..(6): n is a, c, g, or t
  misc_feature (206)..(206): n is a, c, g, or t
tagagnaaattactatgagaggatcgcatcaccatcaccatcacggatcctatttaggtgacactatagaatcgtcgacccacgcgtccgaactacccctaaaagccaaaatgggaaaggaaaagactcatatcaacattgtcgtcattggacacgtagattcgggcaagtccaccactactggccatctgatctataaatgcggnggcatcgacaaaagaaccattgaaaaatttgagaaggaggctgctgagat

SEQ ID NO: 364 - DNA, 1376 bp, Homo Sapiens
  misc_feature (869)..(869): n is a, c, g, or t
  misc_feature (919)..(919): n is a, c, g, or t
  misc_feature (940)..(941): n is a, c, g, or t
  misc_feature (965)..(965): n is a, c, g, or t
  misc_feature (968)..(968): n is a, c, g, or t
  misc_feature (979)..(979): n is a, c, g, or t
  misc_feature (995)..(995): n is a, c, g, or t
  misc_feature (1000)..(1000): n is a, c, g, or t
  misc_feature (1009)..(1009): n is a, c, g, or t
  misc_feature (1018)..(1018): n is a, c, g, or t
  misc_feature (1022)..(1022): n is a, c, g, or t
  misc_feature (1033)..(1033): n is a, c, g, or t
  misc_feature (1045)..(1045): n is a, c, g, or t
  misc_feature (1049)..(1050): n is a, c, g, or t
  misc_feature (1064)..(1064): n is a, c, g, or t
  misc_feature (1067)..(1067): n is a, c, g, or t
  misc_feature (1069)..(1069): n is a, c, g, or t
  misc_feature (1075)..(1075): n is a, c, g, or t
  misc_feature (1077)..(1077): n is a, c, g, or t
  misc_feature (1099)..(1099): n is a, c, g, or t
  misc_feature (1101)..(1101): n is a, c, g, or t
  misc_feature (1104)..(1104): n is a, c, g, or t
  misc_feature (1127)..(1127): n is a, c, g, or t
  misc_feature (1130)..(1130): n is a, c, g, or t
  misc_feature (1134)..(1134): n is a, c, g, or t
  misc_feature (1142)..(1142): n is a, c, g, or t
  misc_feature (1145)..(1145): n is a, c, g, or t
  misc_feature (1163)..(1164): n is a, c, g, or t
  misc_feature (1166)..(1166): n is a, c, g, or t
  misc_feature (1168)..(1168): n is a, c, g, or t
  misc_feature (1190)..(1190): n is a, c, g, or t
  misc_feature (1192)..(1192): n is a, c, g, or t
  misc_feature (1194)..(1194): n is a, c, g, or t
  misc_feature (1201)..(1204): n is a, c, g, or t
  misc_feature (1216)..(1217): n is a, c, g, or t
  misc_feature (1219)..(1221): n is a, c, g, or t
  misc_feature (1224)..(1224): n is a, c, g, or t
  misc_feature (1226)..(1226): n is a, c, g, or t
  misc_feature (1229)..(1232): n is a, c, g, or t
  misc_feature (1234)..(1235): n is a, c, g, or t
  misc_feature (1237)..(1237): n is a, c, g, or t
  misc_feature (1240)..(1240): n is a, c, g, or t
  misc_feature (1242)..(1243): n is a, c, g, or t
  misc_feature (1245)..(1247): n is a, c, g, or t
  misc_feature (1249)..(1260): n is a, c, g, or t
  misc_feature (1262)..(1264): n is a, c, g, or t
  misc_feature (1267)..(1269): n is a, c, g, or t
  misc_feature (1271)..(1271): n is a, c, g, or t
  misc_feature (1276)..(1276): n is a, c, g, or t
  misc_feature (1278)..(1278): n is a, c, g, or t
  misc_feature (1280)..(1280): n is a, c, g, or t
  misc_feature (1283)..(1283): n is a, c, g, or t
  misc_feature (1286)..(1290): n is a, c, g, or t
  misc_feature (1297)..(1297): n is a, c, g, or t
  misc_feature (1302)..(1304): n is a, c, g, or t
  misc_feature (1307)..(1307): n is a, c, g, or t
  misc_feature (1315)..(1315): n is a, c, g, or t
  misc_feature (1323)..(1323): n is a, c, g, or t
  misc_feature (1336)..(1336): n is a, c, g, or t
  misc_feature (1349)..(1349): n is a, c, g, or t
  misc_feature (1354)..(1355): n is a, c, g, or t
  misc_feature (1367)..(1367): n is a, c, g, or t
  misc_feature (1373)..(1374): n is a, c, g, or t
caatagagaaattactatgagaggatcgcatcaccatcaccatcacggatcctatttaggtgacactatagaatcgtcgacccacgcgtccggcccacgccatgcggcgggcattccgaggccccaagaatgggaggtttgctctggtggaccagcgtgtggccgaatatgtcagatacatgcaggccaaaggggaccccatcacccgggaggcgatgcagctgaaagctctcgaaatcgcccaggaaatgaacattccagagaaagggttcaaggcaagcttgggttggtgtcgaagaatgatgagaaggtatgacctgtctctgaggcataaagtgcccgtgccccagcacctgccggaagacctgactgagaaactcgtcacttaccagcgcagtgtcctggctctgcgcagggcgcatgactatgaggtagctcagatggggaatgcagatgagacgcccatttgtttagaggtgccatcacgggtaactgttgataaccagggcgaaaagcctgtcttggtcaagacaccaggcagggaaaaactgaaaatcacagcaatgcttggtgtcttggctgatgggaggaagttaccaccgtacatcattttgaggggaacatatatccccccggggaagtttcccagtgggatggaaattcgctgccaccggtatgggtggatgactgaagacttgatgcaggactggttggaagtggtgtggagacggaggacaggagcagtgcccaagcagcgagggatgctgatcttgaatggcttccggggccatgccacagattccgtgaagaactccatggaaagcatgaacactgacatggtgatcatcccagggggtctgacctcacancttcaggtgctggatgtcgtggtctacaagccactgaatgacagtgtgcngggcccagtactccaactggnnttctggcttggaaacctggcgctnaancccaacccggnaatgcttaaaaacccnccccntgggccctncttttttgnaatngggtcatggtnccccgtggaaanaacnnttccaagtgaattnctncntccaangntttcaaaaaattgccctttttncnccnacctttgaaagaagaaaaaaaanttncctntggaaaanccnaagtgaatttccccggannananaaaaccccccaaaaaattttgncncncaaaccnnnnttaaaaccattnnannnaangnaannnntnntnccntnntnnntnnnnnnnnnnnnannnccnnnanatttntncnaanttnnnnnccctttnccccnnnaantcaaaaanccccggtntttaaacccctcnaaaaacttttttnttccnnaaaacccccccncccccnnaa

SEQ ID NO: 365 - DNA, 1360 bp, Homo Sapiens
  misc_feature (928)..(928): n is a, c, g, or t
  misc_feature (950)..(950): n is a, c, g, or t
  misc_feature (963)..(963): n is a, c, g, or t
  misc_feature (971)..(971): n is a, c, g, or t
  misc_feature (988)..(988): n is a, c, g, or t
  misc_feature (1022)..(1022): n is a, c, g, or t
  misc_feature (1059)..(1059): n is a, c, g, or t
  misc_feature (1067)..(1067): n is a, c, g, or t
  misc_feature (1072)..(1072): n is a, c, g, or t
  misc_feature (1098)..(1098): n is a, c, g, or t
  misc_feature (1109)..(1109): n is a, c, g, or t
  misc_feature (1113)..(1113): n is a, c, g, or t
  misc_feature (1115)..(1115): n is a, c, g, or t
  misc_feature (1123)..(1123): n is a, c, g, or t
  misc_feature (1135)..(1135): n is a, c, g, or t
  misc_feature (1139)..(1140): n is a, c, g, or t
  misc_feature (1151)..(1151): n is a, c, g, or t
  misc_feature (1154)..(1154): n is a, c, g, or t
  misc_feature (1172)..(1172): n is a, c, g, or t
  misc_feature (1176)..(1176): n is a, c, g, or t
  misc_feature (1184)..(1184): n is a, c, g, or t
  misc_feature (1187)..(1187): n is a, c, g, or t
  misc_feature (1191)..(1191): n is a, c, g, or t
  misc_feature (1193)..(1193): n is a, c, g, or t
  misc_feature (1195)..(1195): n is a, c, g, or t
  misc_feature (1197)..(1197): n is a, c, g, or t
  misc_feature (1199)..(1199): n is a, c, g, or t
  misc_feature (1203)..(1203): n is a, c, g, or t
  misc_feature (1207)..(1207): n is a, c, g, or t
  misc_feature (1216)..(1216): n is a, c, g, or t
  misc_feature (1220)..(1220): n is a, c, g, or t
  misc_feature (1229)..(1229): n is a, c, g, or t
  misc_feature (1240)..(1240): n is a, c, g, or t
  misc_feature (1250)..(1250): n is a, c, g, or t
  misc_feature (1252)..(1252): n is a, c, g, or t
  misc_feature (1255)..(1255): n is a, c, g, or t
  misc_feature (1271)..(1271): n is a, c, g, or t
  misc_feature (1275)..(1275): n is a, c, g, or t
  misc_feature (1286)..(1286): n is a, c, g, or t
  misc_feature (1291)..(1291): n is a, c, g, or t
  misc_feature (1294)..(1294): n is a, c, g, or t
  misc_feature (1314)..(1314): n is a, c, g, or t
  misc_feature (1316)..(1316): n is a, c, g, or t
  misc_feature (1324)..(1324): n is a, c, g, or t
  misc_feature (1336)..(1337): n is a, c, g, or t
  misc_feature (1340)..(1340): n is a, c, g, or t
  misc_feature (1342)..(1342): n is a, c, g, or t
tagagaaattactatgagaggatcgcatcaccatcaccatcacggatcctatttaggtgacactatagaatcgtcgacccacgcgtccgaccttttccccaatgatgaagacgacccagggcaaggaatccagcagcagcacagcagtgcagccgcggctgcccagcagggcggctacgagatccccgcgcggctgcggacgctccacaacctggtgatccagtacgcctcgcaggggcgctacgaggtagctgtgcccctctgcaagcaggccctggaggacctggagaagacttcaggacacgaccacccggacgtggccaccatgctcaacatcctggccttggtgtacagggatcagaataaatacaaagatgcagctaacctactgaatgatgccttggctattcgtgagaaaactttgggcaaagatcatcctgcggtggcggcgactttgaataaccttgcagtcctttatggtaaaagagggaagtacaaagaagcagagccgttgtgtaaaagagctctggaaatccgagaaaaggttttggggaaggatcaccccgatgttgccaagcagttaaataacttggccttactgtgccagaaccagggcaagtatgaagaagtagaatattattatcaaagagccctcgagatctaccagacaaaactgggacctgatgaccccaacgtggctaagacgaaaaataacctggcatcctgctatttgaaacaaggaaagttcaagcaagcagaaacactgtacaaagagattctcactcgtgcacatgaaagggagtttggttctgtagatgatgaaaataaacccatctggatgcatgctgaagaaagagaagaatgcaaaggaaagcaaagggatgggacatcttttggagagtatggcggctggtacaaagcctgcaangttgatagtccaactgttacanccactctaaaaancttggggncactttacagacgtcanggcaaatttgaagctgcaaaaacgttaaaaaaanctgctatgaggtctcgtaaacagggtcttgaaatgtnccaaacanagggnggcaaaaatgctcatgaccctgaaanatggaaaaccnagancnggaaaacntcacgggactgntcannaaaaatggccnganggagggggaaatgagaantaanccgggggntantgantntnangncccnggcnaaccccggnattncaaggttcnggggggggggncccccaattncnttntcccaggggcccgggntaanccctaaatttnaaagnccnttgaagggcctttttggggncntttggggnccttttttaaannttncnaaaaaaaaaaaaaaaaaa

SEQ ID NO: 366 - DNA, 1200 bp, Homo Sapiens
  misc_feature (5)..(5): n is a, c, g, or t
  misc_feature (8)..(10): n is a, c, g, or t
  misc_feature (17)..(18): n is a, c, g, or t
  misc_feature (31)..(31): n is a, c, g, or t
  misc_feature (35)..(35): n is a, c, g, or t
  misc_feature (39)..(39): n is a, c, g, or t
  misc_feature (45)..(45): n is a, c, g, or t
  misc_feature (52)..(52): n is a, c, g, or t
  misc_feature (66)..(66): n is a, c, g, or t
  misc_feature (69)..(69): n is a, c, g, or t
  misc_feature (73)..(73): n is a, c, g, or t
  misc_feature (77)..(77): n is a, c, g, or t
  misc_feature (90)..(91): n is a, c, g, or t
  misc_feature (100)..(100): n is a, c, g, or t
  misc_feature (104)..(104): n is a, c, g, or t
  misc_feature (106)..(106): n is a, c, g, or t
  misc_feature (108)..(108): n is a, c, g, or t
  misc_feature (121)..(121): n is a, c, g, or t
  misc_feature (124)..(125): n is a, c, g, or t
  misc_feature (128)..(128): n is a, c, g, or t
  misc_feature (134)..(134): n is a, c, g, or t
  misc_feature (149)..(149): n is a, c, g, or t
  misc_feature (155)..(155): n is a, c, g, or t
  misc_feature (166)..(166): n is a, c, g, or t
  misc_feature (170)..(170): n is a, c, g, or t
  misc_feature (177)..(177): n is a, c, g, or t
  misc_feature (179)..(179): n is a, c, g, or t
  misc_feature (189)..(189): n is a, c, g, or t
  misc_feature (198)..(198): n is a, c, g, or t
  misc_feature (200)..(200): n is a, c, g, or t
  misc_feature (202)..(202): n is a, c, g, or t
  misc_feature (225)..(225): n is a, c, g, or t
  misc_feature (228)..(228): n is a, c, g, or t
  misc_feature (231)..(232): n is a, c, g, or t
  misc_feature (236)..(237): n is a, c, g, or t
  misc_feature (240)..(240): n is a, c, g, or t
  misc_feature (247)..(247): n is a, c, g, or t
  misc_feature (250)..(250): n is a, c, g, or t
  misc_feature (252)..(253): n is a, c, g, or t
  misc_feature (256)..(256): n is a, c, g, or t
  misc_feature (261)..(261): n is a, c, g, or t
  misc_feature (265)..(265): n is a, c, g, or t
  misc_feature (267)..(267): n is a, c, g, or t
  misc_feature (269)..(270): n is a, c, g, or t
  misc_feature (272)..(272): n is a, c, g, or t
  misc_feature (276)..(276): n is a, c, g, or t
  misc_feature (281)..(281): n is a, c, g, or t
  misc_feature (292)..(292): n is a, c, g, or t
  misc_feature (294)..(299): n is a, c, g, or t
  misc_feature (310)..(310): n is a, c, g, or t
  misc_feature (318)..(318): n is a, c, g, or t
  misc_feature (320)..(320): n is a, c, g, or t
  misc_feature (323)..(323): n is a, c, g, or t
  misc_feature (328)..(330): n is a, c, g, or t
  misc_feature (334)..(335): n is a, c, g, or t
  misc_feature (345)..(345): n is a, c, g, or t
  misc_feature (353)..(353): n is a, c, g, or t
  misc_feature (360)..(360): n is a, c, g, or t
  misc_feature (364)..(364): n is a, c, g, or t
  misc_feature (366)..(366): n is a, c, g, or t
  misc_feature (372)..(372): n is a, c, g, or t
  misc_feature (374)..(374): n is a, c, g, or t
  misc_feature (376)..(376): n is a, c, g, or t
  misc_feature (384)..(384): n is a, c, g, or t
  misc_feature (391)..(391): n is a, c, g, or t
  misc_feature (395)..(395): n is a, c, g, or t
  misc_feature (403)..(403): n is a, c, g, or t
  misc_feature (407)..(407): n is a, c, g, or t
  misc_feature (409)..(409): n is a, c, g, or t
  misc_feature (411)..(411): n is a, c, g, or t
  misc_feature (415)..(415): n is a, c, g, or t
  misc_feature (418)..(418): n is a, c, g, or t
  misc_feature (424)..(424): n is a, c, g, or t
  misc_feature (426)..(426): n is a, c, g, or t
  misc_feature (445)..(446): n is a, c, g, or t
  misc_feature (449)..(449): n is a, c, g, or t
  misc_feature (454)..(454): n is a, c, g, or t
  misc_feature (460)..(461): n is a, c, g, or t
  misc_feature (463)..(463): n is a, c, g, or t
  misc_feature (469)..(469): n is a, c, g, or t
  misc_feature (471)..(471): n is a, c, g, or t
  misc_feature (478)..(478): n is a, c, g, or t
  misc_feature (480)..(480): n is a, c, g, or t
  misc_feature (488)..(489): n is a, c, g, or t
  misc_feature (491)..(491): n is a, c, g, or t
  misc_feature (494)..(495): n is a, c, g, or t
  misc_feature (504)..(505): n is a, c, g, or t
  misc_feature (516)..(517): n is a, c, g, or t
  misc_feature (520)..(520): n is a, c, g, or t
  misc_feature (525)..(525): n is a, c, g, or t
  misc_feature (527)..(528): n is a, c, g, or t
  misc_feature (536)..(537): n is a, c, g, or t
  misc_feature (547)..(549): n is a, c, g, or t
  misc_feature (551)..(551): n is a, c, g, or t
  misc_feature (555)..(555): n is a, c, g, or t
  misc_feature (558)..(558): n is a, c, g, or t
  misc_feature (563)..(563): n is a, c, g, or t
  misc_feature (568)..(570): n is a, c, g, or t
  misc_feature (572)..(573): n is a, c, g, or t
  misc_feature (577)..(578): n is a, c, g, or t
  misc_feature (581)..(581): n is a, c, g, or t
  misc_feature (583)..(584): n is a, c, g, or t
  misc_feature (586)..(586): n is a, c, g, or t
  misc_feature (588)..(588): n is a, c, g, or t
  misc_feature (592)..(592): n is a, c, g, or t
  misc_feature (595)..(595): n is a, c, g, or t
  misc_feature (597)..(597): n is a, c, g, or t
  misc_feature (603)..(603): n is a, c, g, or t
  misc_feature (610)..(610): n is a, c, g, or t
  misc_feature (614)..(614): n is a, c, g, or t
  misc_feature (619)..(621): n is a, c, g, or t
  misc_feature (629)..(629): n is a, c, g, or t
  misc_feature (640)..(640): n is a, c, g, or t
  misc_feature (647)..(647): n is a, c, g, or t
  misc_feature (652)..(652): n is a, c, g, or t
  misc_feature (671)..(672): n is a, c, g, or t
  misc_feature (682)..(683): n is a, c, g, or t
  misc_feature (686)..(686): n is a, c, g, or t
  misc_feature (692)..(692): n is a, c, g, or t
  misc_feature (716)..(717): n is a, c, g, or t
  misc_feature (719)..(723): n is a, c, g, or t
  misc_feature (725)..(726): n is a, c, g, or t
  misc_feature (732)..(734): n is a, c, g, or t
  misc_feature (746)..(746): n is a, c, g, or t
  misc_feature (749)..(750): n is a, c, g, or t
  misc_feature (758)..(760): n is a, c, g, or t
  misc_feature (763)..(763): n is a, c, g, or t
  misc_feature (766)..(766): n is a, c, g, or t
  misc_feature (773)..(775): n is a, c, g, or t
  misc_feature (777)..(778): n is a, c, g, or t
  misc_feature (782)..(782): n is a, c, g, or t
  misc_feature (793)..(793): n is a, c, g, or t
  misc_feature (799)..(799): n is a, c, g, or t
  misc_feature (802)..(802): n is a, c, g, or t
  misc_feature (814)..(815): n is a, c, g, or t
  misc_feature (817)..(817): n is a, c, g, or t
  misc_feature (824)..(827): n is a, c, g, or t
  misc_feature (830)..(830): n is a, c, g, or t
  misc_feature (833)..(833): n is a, c, g, or t
  misc_feature (837)..(838): n is a, c, g, or t
  misc_feature (840)..(842): n is a, c, g, or t
  misc_feature (844)..(845): n is a, c, g, or t
  misc_feature (850)..(850): n is a, c, g, or t
  misc_feature (853)..(853): n is a, c, g, or t
  misc_feature (857)..(857): n is a, c, g, or t
  misc_feature (864)..(864): n is a, c, g, or t
  misc_feature (867)..(867): n is a, c, g, or t
  misc_feature (876)..(876): n is a, c, g, or t
  misc_feature (879)..(879): n is a, c, g, or t
  misc_feature (882)..(884): n is a, c, g, or t
  misc_feature (887)..(888): n is a, c, g, or t
  misc_feature (890)..(890): n is a, c, g, or t
  misc_feature (893)..(894): n is a, c, g, or t
  misc_feature (897)..(897): n is a, c, g, or t
  misc_feature (899)..(899): n is a, c, g, or t
  misc_feature (901)..(901): n is a, c, g, or t
  misc_feature (904)..(905): n is a, c, g, or t
  misc_feature (907)..(907): n is a, c, g, or t
  misc_feature (919)..(919): n is a, c, g, or t
  misc_feature (921)..(921): n is a, c, g, or t
  misc_feature (929)..(929): n is a, c, g, or t
  misc_feature (931)..(931): n is a, c, g, or t
  misc_feature (938)..(939): n is a, c, g, or t
  misc_feature (945)..(946): n is a, c, g, or t
  misc_feature (951)..(951): n is a, c, g, or t
  misc_feature (955)..(956): n is a, c, g, or t
  misc_feature (959)..(960): n is a, c, g, or t
  misc_feature (965)..(967): n is a, c, g, or t
  misc_feature (970)..(970): n is a, c, g, or t
  misc_feature (974)..(974): n is a, c, g, or t
  misc_feature (977)..(977): n is a, c, g, or t
  misc_feature (985)..(985): n is a, c, g, or t
  misc_feature (990)..(990): n is a, c, g, or t
  misc_feature (994)..(995): n is a, c, g, or t
  misc_feature (997)..(997): n is a, c, g, or t
  misc_feature (999)..(999): n is a, c, g, or t
  misc_feature (1007)..(1007): n is a, c, g, or t
  misc_feature (1009)..(1009): n is a, c, g, or t
  misc_feature (1013)..(1015): n is a, c, g, or t
  misc_feature (1019)..(1019): n is a, c, g, or t
  misc_feature (1027)..(1027): n is a, c, g, or t
  misc_feature (1030)..(1031): n is a, c, g, or t
  misc_feature (1033)..(1033): n is a, c, g, or t
  misc_feature (1035)..(1037): n is a, c, g, or t
  misc_feature (1039)..(1039): n is a, c, g, or t
  misc_feature (1045)..(1047): n is a, c, g, or t
  misc_feature (1053)..(1053): n is a, c, g, or t
  misc_feature (1056)..(1056): n is a, c, g, or t
  misc_feature (1058)..(1058): n is a, c, g, or t
  misc_feature (1067)..(1067): n is a, c, g, or t
  misc_feature (1069)..(1069): n is a, c, g, or t
  misc_feature (1072)..(1073): n is a, c, g, or t
  misc_feature (1078)..(1078): n is a, c, g, or t
  misc_feature (1081)..(1081): n is a, c, g, or t
  misc_feature (1086)..(1086): n is a, c, g, or t
  misc_feature (1093)..(1093): n is a, c, g, or t
  misc_feature (1098)..(1100): n is a, c, g, or t
  misc_feature (1102)..(1102): n is a, c, g, or t
  misc_feature (1105)..(1105): n is a, c, g, or t
  misc_feature (1118)..(1118): n is a, c, g, or t
  misc_feature (1125)..(1126): n is a, c, g, or t
  misc_feature (1133)..(1136): n is a, c, g, or t
  misc_feature (1140)..(1140): n is a, c, g, or t
  misc_feature (1144)..(1144): n is a, c, g, or t
  misc_feature (1146)..(1146): n is a, c, g, or t
  misc_feature (1149)..(1150): n is a, c, g, or t
  misc_feature (1152)..(1152): n is a, c, g, or t
  misc_feature (1155)..(1156): n is a, c, g, or t
  misc_feature (1159)..(1159): n is a, c, g, or t
  misc_feature (1161)..(1162): n is a, c, g, or t
  misc_feature (1164)..(1164): n is a, c, g, or t
  misc_feature (1166)..(1166): n is a, c, g, or t
  misc_feature (1170)..(1170): n is a, c, g, or t
  misc_feature (1177)..(1177): n is a, c, g, or t
  misc_feature (1184)..(1184): n is a, c, g, or t
  misc_feature (1186)..(1186): n is a, c, g, or t
  misc_feature (1191)..(1191): n is a, c, g, or t
  misc_feature (1194)..(1194): n is a, c, g, or t
aatantannngaaattnntttgggggggttncctncccnttcccnttcgggnttcttttttggggnacnttanaaantctttcaacccannctttcggcncagnangngggagcaattggnttnngancccgantgctgtgcgcgagcnccgcanccaccgggctngganatcttgngncgatccgcgnccgcttcgncngngcggtgcgcgatcggataagccntgnccnngccnnacntcggacncgngnnganaccanaggngngnnanctgngcganggccggagcgnannnnnnactgcctccgncgtcagcnanttngatgnnnttgnncttcccgganccggatangtagccngggngngaccancnanccccttcnctgctcngcanatgtaagngagncnanaagntantattantncttcataccgtggcctctnncanagatnaagagnntntaaaanantaggccngnccgggatnnanatnnaggcctganngatgccgcgannttnacatncnnttcaaatnnctaacgtctnnntntttntgnatcancaagnnngnnttanntgngnncncnaagnaantncttccntttaccnagtnaaatnnnagccaaanatcctggcaangatctgntcaanaatgtcaaggcttcgaaannatgttgcttnngtnaaatantaaaacacccctttccgttctggnntnnnnngnntattannnacttcaccatanaannttattgtnnnttnganaaaagcnnntnnaccntaatatccttnaagctnctnaaaatctgcctnntnaatattnnnnganaantacnntnnncnnaaagnatnatangcatgtncanggaaaaccnggnttnnnttnntnatnnccnantnttnnantctaataaaccntnataataantntttaaannaatcanngtctntgannaannttttnnnaanaaanaancttaaacntttgncatnnantnttttatanancttnnncagnaaaatcanatnntntnnncntccaannntggaanttnanaaaatctcncnttnntcctnagnggatngattaanaaaannnanatnccaatctttaagncttattnnctggttnnnngatnaccncnaannangannttnanngntnacanaaaatcnaaaaagntnttacnccnccccat

SEQ ID NO: 367 - DNA, 256 bp, Homo Sapiens
  misc_feature (1)..(3): n is a, c, g, or t
nnnctatgagaggatcgcatcaccatcaccatcacggatcctatttaggtgacactatagaatcgtcgacccacgcgtccgcgctggccgacgccatcaacaccgagttcaagaacacccgcaccaacgagaaggtggagctgcaggagctgaatgaccgcttcgccaactacatcgacaaggtgcgcttcctggagcagcagaataagatcctgctggccgagctcgagcagctcaagggccaaggcaagtcgcg

SEQ ID NO: 368 - DNA, 1200 bp, Homo Sapiens
  misc_feature (935)..(935): n is a, c, g, or t
  misc_feature (945)..(945): n is a, c, g, or t
  misc_feature (956)..(956): n is a, c, g, or t
  misc_feature (968)..(968): n is a, c, g, or t
  misc_feature (972)..(973): n is a, c, g, or t
  misc_feature (997)..(997): n is a, c, g, or t
  misc_feature (999)..(999): n is a, c, g, or t
  misc_feature (1008)..(1008): n is a, c, g, or t
  misc_feature (1016)..(1016): n is a, c, g, or t
  misc_feature (1018)..(1018): n is a, c, g, or t
  misc_feature (1028)..(1028): n is a, c, g, or t
  misc_feature (1050)..(1050): n is a, c, g, or t
  misc_feature (1053)..(1053): n is a, c, g, or t
  misc_feature (1068)..(1068): n is a, c, g, or t
  misc_feature (1088)..(1088): n is a, c, g, or t
  misc_feature (1100)..(1100): n is a, c, g, or t
  misc_feature (1105)..(1105): n is a, c, g, or t
  misc_feature (1109)..(1109): n is a, c, g, or t
  misc_feature (1118)..(1119): n is a, c, g, or t
  misc_feature (1132)..(1132): n is a, c, g, or t
  misc_feature (1139)..(1139): n is a, c, g, or t
  misc_feature (1144)..(1144): n is a, c, g, or t
  misc_feature (1148)..(1148): n is a, c, g, or t
  misc_feature (1153)..(1153): n is a, c, g, or t
  misc_feature (1165)..(1168): n is a, c, g, or t
  misc_feature (1173)..(1173): n is a, c, g, or t
  misc_feature (1177)..(1178): n is a, c, g, or t
  misc_feature (1181)..(1183): n is a, c, g, or t
  misc_feature (1193)..(1194): n is a, c, g, or t
  misc_feature (1199)..(1199): n is a, c, g, or t
tagagaaattactatgagaggatcgcatcaccatcaccatcacggatcctatttaggtgacactatagaatcgtcgacccacgcgtccggcccgcccgcgcccgtccgcagccgcccgccagacgcgcccagtatgagggagatcgtgcacatccaggccggccagtgcggcaaccagatcggggccaagttctgggaagtcatcagtgatgagcatggcatcgaccccagcggcaactacgtgggcgactcggacttgcagctggagcggatcagcgtctactacaacgaggcctcttctcacaagtacgtgcctcgagccattctggtggacctggaacccggaaccatggacagtgtccgctcaggggcctttggacatctcttcaggcctgacaatttcatctttggtcagagtggggccggcaacaactgggccaagggtcactacacggagggggcggagctggtggattcggtcctggatgtggtgcggaaggagtgtgaaaactgcgactgcctgcagggcttccagctgacccactcgctggggggcggcacgggctccggcatgggcacgttgctcatcagcaaggtgcgtgaggagtatcccgaccgcatcatgaacaccttcagcgtcgtgccctcacccaaggtgtcagacacggtggtggagccctacaacgccacgctgtccatccaccagctggtggagaacacggatgagacctactgcatcgacaacgaggcgctctacgacatctgcttccgcaccctcaagctggccacgcccacctacggggacctcaaccacctggtatcggccaccatgagcggagtcaccacctccttgcgcttcccgggccagctcaacgctgacctgcgcaagctggccgtcaacatggtgcccttcccgcgcctgcacttcttcatgnccgggcttcnccccccctcanagcccggggcanccannaataccgggccctgaccgtgcccnanctcacccancaaatgtncnatgtcaaaanatgatggccgcctgcaacccgngcnaggccgctaactganggggccaccgtgttccgggncccatgtccttnaagangtgnaaaaaaaannctggcctccaaanaaaaaanactanttcnggaanggatccccaaannnnaaggngccnnggnnnaatccccccnngcctna

SEQ ID NO: 369 - DNA, 1302 bp, Homo Sapiens
  misc_feature (1)..(1): n is a, c, g, or t
  misc_feature (3)..(3): n is a, c, g, or t
  misc_feature (913)..(936): n is a, c, g, or t
  misc_feature (939)..(939): n is a, c, g, or t
  misc_feature (964)..(964): n is a, c, g, or t
  misc_feature (968)..(968): n is a, c, g, or t
  misc_feature (971)..(971): n is a, c, g, or t
  misc_feature (976)..(976): n is a, c, g, or t
  misc_feature (978)..(978): n is a, c, g, or t
  misc_feature (980)..(980): n is a, c, g, or t
  misc_feature (1029)..(1029): n is a, c, g, or t
  misc_feature (1048)..(1048): n is a, c, g, or t
  misc_feature (1059)..(1059): n is a, c, g, or t
  misc_feature (1066)..(1066): n is a, c, g, or t
  misc_feature (1084)..(1084): n is a, c, g, or t
  misc_feature (1090)..(1090): n is a, c, g, or t
  misc_feature (1094)..(1094): n is a, c, g, or t
  misc_feature (1100)..(1101): n is a, c, g, or t
  misc_feature (1103)..(1103): n is a, c, g, or t
  misc_feature (1109)..(1111): n is a, c, g, or t
  misc_feature (1115)..(1115): n is a, c, g, or t
  misc_feature (1119)..(1119): n is a, c, g, or t
  misc_feature (1124)..(1124): n is a, c, g, or t
  misc_feature (1131)..(1131): n is a, c, g, or t
  misc_feature (1134)..(1134): n is a, c, g, or t
  misc_feature (1152)..(1152): n is a, c, g, or t
  misc_feature (1156)..(1156): n is a, c, g, or t
  misc_feature (1162)..(1162): n is a, c, g, or t
  misc_feature (1165)..(1165): n is a, c, g, or t
  misc_feature (1176)..(1177): n is a, c, g, or t
  misc_feature (1181)..(1181): n is a, c, g, or t
  misc_feature (1185)..(1185): n is a, c, g, or t
  misc_feature (1203)..(1203): n is a, c, g, or t
  misc_feature (1208)..(1210): n is a, c, g, or t
  misc_feature (1213)..(1214): n is a, c, g, or t
  misc_feature (1216)..(1216): n is a, c, g, or t
  misc_feature (1221)..(1222): n is a, c, g, or t
  misc_feature (1224)..(1226): n is a, c, g, or t
  misc_feature (1230)..(1230): n is a, c, g, or t
  misc_feature (1232)..(1233): n is a, c, g, or t
  misc_feature (1237)..(1237): n is a, c, g, or t
  misc_feature (1239)..(1240): n is a, c, g, or t
  misc_feature (1244)..(1244): n is a, c, g, or t
  misc_feature (1249)..(1250): n is a, c, g, or t
  misc_feature (1255)..(1258): n is a, c, g, or t
  misc_feature (1260)..(1260): n is a, c, g, or t
  misc_feature (1269)..(1269): n is a, c, g, or t
  misc_feature (1272)..(1274): n is a, c, g, or t
  misc_feature (1290)..(1290): n is a, c, g, or t
  misc_feature (1300)..(1300): n is a, c, g, or t
  misc_feature (1302)..(1302): n is a, c, g, or t
nantagagaaattactatgagaggatcgcatcaccatcaccatcacggatcctatttaggtgacactatagaatcgtcgacccacgcgtccgggatgcgagaggcagtccaggaaatgaaggaccatatggtcagcccaacagccgtagcatttttggagaggaataacagagagatactcgcaggcaagccagctgcccagaagtcacccagcgacctgctggatgccagcgcagtctcggccacatctcgctacatcgaggagcagcaggccacacagcagctgatcatggatgaacaggatcaacagctggagatggtgtctgggagcatccaggttctgaagcacatgtccggccgcgttggagaagagctggacgagcagggcatcatgctggatgccttcgcccaagagatggaccacacccagtcccgcatggacggggtcctcaggaagttggccaaagtatcccacatgacgagtgaccgccgacagtggtgtgccatcgccgtgctagtgggggtgcttctcctcgttctcatcttactattctctctctgaccccagccctccctggcaggctggtcccttaagcctggggagccaccaagcactttggagctggcctcgccccctaggaggagagggtccctcctgggtagctggagagtagagggtcccgcctggggagctgtccccatggctctcccctagagccagtgggacccttcaggaccctgggctggaaccaccaccactggtcctgtctcaagtgcacttagggggtggtggaggcagggacacctgagacacacctgtctccatttccagttccaggaccccaaagccatttgcccctgtgccttatacacgtgccaacctggaaaataaaatgtcagccttttttataannnnnnnnnnnnnnnnnnnnnnnnaanggcggccgctccctatagtgagtcntatnaancttantnanctgaacttggactcctgttgataaatccagtaatgacctcaaaactccntctggattttttcaaaacnctcggttgccnccgggcntttttttttggtgaaaantccaanctancttggnnanattttnnngganctanggaanctaaatnggnaaaaaaaaaatccctggnaatncccccnttnaaatttcccannggcntccnaaaaaaaatttttagggnttttnnnccnntngcccnngnnnccananncaancnnttcncctgnnaattnnnncntttttaaanccnnnaaaaaaaaaaccccanttttttcccncn

SEQ ID NO: 370 - DNA, 1200 bp, Homo Sapiens
  misc_feature (791)..(791): n is a, c, g, or t
  misc_feature (796)..(796): n is a, c, g, or t
  misc_feature (907)..(907): n is a, c, g, or t
  misc_feature (910)..(910): n is a, c, g, or t
  misc_feature (913)..(913): n is a, c, g, or t
  misc_feature (916)..(916): n is a, c, g, or t
  misc_feature (922)..(922): n is a, c, g, or t
  misc_feature (926)..(926): n is a, c, g, or t
  misc_feature (929)..(929): n is a, c, g, or t
  misc_feature (936)..(937): n is a, c, g, or t
  misc_feature (968)..(968): n is a, c, g, or t
  misc_feature (970)..(970): n is a, c, g, or t
  misc_feature (978)..(978): n is a, c, g, or t
  misc_feature (980)..(980): n is a, c, g, or t
  misc_feature (989)..(989): n is a, c, g, or t
  misc_feature (996)..(996): n is a, c, g, or t
  misc_feature (998)..(998): n is a, c, g, or t
  misc_feature (1009)..(1009): n is a, c, g, or t
  misc_feature (1014)..(1014): n is a, c, g, or t
  misc_feature (1037)..(1037): n is a, c, g, or t
  misc_feature (1040)..(1040): n is a, c, g, or t
  misc_feature (1043)..(1043): n is a, c, g, or t
  misc_feature (1070)..(1070): n is a, c, g, or t
  misc_feature (1073)..(1073): n is a, c, g, or t
  misc_feature (1080)..(1080): n is a, c, g, or t
  misc_feature (1087)..(1088): n is a, c, g, or t
  misc_feature (1090)..(1090): n is a, c, g, or t
  misc_feature (1099)..(1100): n is a, c, g, or t
  misc_feature (1102)..(1104): n is a, c, g, or t
  misc_feature (1106)..(1106): n is a, c, g, or t
  misc_feature (1109)..(1109): n is a, c, g, or t
  misc_feature (1118)..(1119): n is a, c, g, or t
  misc_feature (1123)..(1123): n is a, c, g, or t
  misc_feature (1134)..(1134): n is a, c, g, or t
  misc_feature (1149)..(1149): n is a, c, g, or t
  misc_feature (1151)..(1152): n is a, c, g, or t
  misc_feature (1161)..(1161): n is a, c, g, or t
  misc_feature (1169)..(1169): n is a, c, g, or t
  misc_feature (1172)..(1172): n is a, c, g, or t
  misc_feature (1175)..(1175): n is a, c, g, or t
  misc_feature (1177)..(1177): n is a, c, g, or t
  misc_feature (1184)..(1185): n is a, c, g, or t
tagagaaattactatgagaggatcgcatcaccatcaccatcacggaatcctatttaggtgacactatagaatcgtcgacccacgcgtccgaccagattgatgaagtaaaggtgtggcctcagcagccctccggagagctgtttgagattgaaatagacaccctggaaaccacctgccatgtgctggaccccacccctgtggcaagatgcagcgtgaggcagctgaaggagcatgctgtcgaaggagactgtgatttccagctgttgaaactagatggcaagttttccgtggtatacgcaaaatgtgattccagaacaacggctcagcttgtgcccctcccaccttctacctatgtggagtttacagtgtctggcactgactgtgttgctaaagaggccacagaggcagccaagtgtaacctgctggcagaaaagcaatatggcttttgtaaggcaacactcagtgagaagcttggtggggcagaggttgcagtgacctgcacggtgttccaaacacagcccgtgacctcacagccccaaccagaaggtgccaatgaagcagtccccacccccgtggtggacccagatgcacctccgtcccctccacttggcgcacctggactccctccagctggctcacccccagactcccatgtgttactggcagctcctccaggacaccagttgcaccgggcgcactacgacctgcgccacaccttcatgggtgtggtctcattggggtcaccctcaggagaagtgtcgcacccccggaaaacacgcacagtggtgcancctantgttggtgctgctgctgggccagtggttcctccatgtccggggaggatcaaacacttcaaggtctaggctaaacatggcaaaaatgaagaggtttggccacaaaaaaacantanccnccnattttntccnaancctgggnnatggggtggggggcccttgtctgctggcccncnccaagtgncncatggcgantctaaantnaaaaatcaagntcttngaactcccctaatttcccggtcnttnccnccaaggaaaaaaaacaaaaaggggggnggnggtttantgttttnnanaaaaaggcnntnnngnttnaaaaacttnncctngattttttaanggtaaaccccccccngnnatggggttncccggccnccnggntnacctttnnaaaaacctttggaaa

SEQ ID NO: 371 - DNA, 1292 bp, Homo Sapiens
  misc_feature (1)..(2): n is a, c, g, or t
  misc_feature (4)..(12): n is a, c, g, or t
  misc_feature (705)..(705): n is a, c, g, or t
  misc_feature (721)..(721): n is a, c, g, or t
  misc_feature (773)..(773): n is a, c, g, or t
  misc_feature (809)..(809): n is a, c, g, or t
  misc_feature (811)..(811): n is a, c, g, or t
  misc_feature (815)..(815): n is a, c, g, or t
  misc_feature (820)..(820): n is a, c, g, or t
  misc_feature (823)..(823): n is a, c, g, or t
  misc_feature (860)..(860): n is a, c, g, or t
  misc_feature (864)..(864): n is a, c, g, or t
  misc_feature (903)..(903): n is a, c, g, or t
  misc_feature (905)..(905): n is a, c, g, or t
  misc_feature (913)..(914): n is a, c, g, or t
  misc_feature (924)..(924): n is a, c, g, or t
  misc_feature (928)..(928): n is a, c, g, or t
  misc_feature (932)..(932): n is a, c, g, or t
  misc_feature (938)..(938): n is a, c, g, or t
  misc_feature (942)..(942): n is a, c, g, or t
  misc_feature (965)..(966): n is a, c, g, or t
  misc_feature (970)..(970): n is a, c, g, or t
  misc_feature (977)..(977): n is a, c, g, or t
  misc_feature (979)..(979): n is a, c, g, or t
  misc_feature (984)..(984): n is a, c, g, or t
  misc_feature (986)..(986): n is a, c, g, or t
  misc_feature (995)..(996): n is a, c, g, or t
  misc_feature (1005)..(1006): n is a, c, g, or t
  misc_feature (1012)..(1013): n is a, c, g, or t
  misc_feature (1018)..(1018): n is a, c, g, or t
  misc_feature (1021)..(1021): n is a, c, g, or t
  misc_feature (1023)..(1023): n is a, c, g, or t
  misc_feature (1026)..(1026): n is a, c, g, or t
  misc_feature (1029)..(1030): n is a, c, g, or t
  misc_feature (1033)..(1034): n is a, c, g, or t
  misc_feature (1037)..(1037): n is a, c, g, or t
  misc_feature (1044)..(1045): n is a, c, g, or t
  misc_feature (1048)..(1048): n is a, c, g, or t
  misc_feature (1050)..(1050): n is a, c, g, or t
  misc_feature (1058)..(1058): n is a, c, g, or t
  misc_feature (1060)..(1063): n is a, c, g, or t
  misc_feature (1067)..(1067): n is a, c, g, or t
  misc_feature (1070)..(1070): n is a, c, g, or t
  misc_feature (1075)..(1075): n is a, c, g, or t
  misc_feature (1078)..(1078): n is a, c, g, or t
  misc_feature (1080)..(1080): n is a, c, g, or t
  misc_feature (1084)..(1086): n is a, c, g, or t
  misc_feature (1096)..(1096): n is a, c, g, or t
  misc_feature (1100)..(1100): n is a, c, g, or t
  misc_feature (1103)..(1103): n is a, c, g, or t
  misc_feature (1106)..(1106): n is a, c, g, or t
  misc_feature (1108)..(1109): n is a, c, g, or t
  misc_feature (1121)..(1121): n is a, c, g, or t
  misc_feature (1123)..(1123): n is a, c, g, or t
  misc_feature (1125)..(1125): n is a, c, g, or t
  misc_feature (1131)..(1132): n is a, c, g, or t
  misc_feature (1134)..(1136): n is a, c, g, or t
  misc_feature (1140)..(1142): n is a, c, g, or t
  misc_feature (1147)..(1147): n is a, c, g, or t
  misc_feature (1152)..(1152): n is a, c, g, or t
  misc_feature (1154)..(1154): n is a, c, g, or t
  misc_feature (1158)..(1158): n is a, c, g, or t
  misc_feature (1162)..(1162): n is a, c, g, or t
  misc_feature (1169)..(1169): n is a, c, g, or t
  misc_feature (1173)..(1173): n is a, c, g, or t
  misc_feature (1176)..(1177): n is a, c, g, or t
  misc_feature (1183)..(1184): n is a, c, g, or t
  misc_feature (1193)..(1193): n is a, c, g, or t
  misc_feature (1195)..(1196): n is a, c, g, or t
  misc_feature (1200)..(1201): n is a, c, g, or t
  misc_feature (1203)..(1205): n is a, c, g, or t
  misc_feature (1214)..(1216): n is a, c, g, or t
  misc_feature (1228)..(1229): n is a, c, g, or t
  misc_feature (1231)..(1231): n is a, c, g, or t
  misc_feature (1235)..(1235): n is a, c, g, or t
  misc_feature (1237)..(1237): n is a, c, g, or t
  misc_feature (1249)..(1250): n is a, c, g, or t
  misc_feature (1255)..(1256): n is a, c, g, or t
  misc_feature (1258)..(1262): n is a, c, g, or t
  misc_feature (1266)..(1266): n is a, c, g, or t
  misc_feature (1268)..(1269): n is a, c, g, or t
  misc_feature (1278)..(1282): n is a, c, g, or t
  misc_feature (1286)..(1286): n is a, c, g, or t
  misc_feature (1288)..(1288): n is a, c, g, or t
  misc_feature (1292)..(1292): n is a, c, g, or t
nnannnnnnnnnattagagaaaattactatgagaggatcgcatcaccattcaccattcacggatcctatttaggtgacacttattagaatcgtcgacccacgcgtccgcccacgcgtccgggcgtgagctggcgccgaaatgggagaaagcagcgagtgagaggggaaggggcgccaggcgagcacccgggagccagcgggacctgggcaggggcgcccggagcaggcgcgcatggcgggccccgcgcggggatccggctggaagagagcgtagcacggctcgcacgagtgagtggacgtgggaggcgcgcatctgcgggggaatcgccccttgcccgcctccggcgccgcccgctgagccctgttttccgcaggtccggggccgatgtaccaggtgagcggccagcgcccctctggctgcgacgcgccctatggagcccccagcgcagccccgggcccagaccctatccctccttcctgggctggaggtagtaacaggatccactcaccctgcggaggcagcaccagaggagggctccctggaggaggcggcaacccccatgccccaaggcaatggccctggcatcccccagggcctggacagcactgacctcgacgtccccacagaagctgtgacatgccagcctcaggggaaccccttgggctgcaccccacttctgccgaatgactctggccacccctcanagctgggcggcaccanacgggcggggaatggtgccctgggtggccccaaggcccaccggaagttgcanacacacccatctctcgccagccagggcagcaagaanantaanagcancancaaatccaccacctcccaaatccccctccaggcacangaanactgctgtgtccactgcatcctgtcctgcctgttctgcnanttcctganncttttgcaanatcnttcntggaantgcncccacctgtggcttccttgcaanntcgnaagaatncntgccntntgctgcttnntgctgtggnnttttgnnaaatnttncnaantgnnaannttncccttgnnaancnttgaaatngnnnnattnttngaatnccntncttnnnaattcccccnaaanttnccntnnaaaaatttttcntngnaaatgnntnnngggnnnttttnctttntncctncttnaaacctntttnttnngggggnnttaaaaccnanncctnngnnnccccccttnnnaaaatttccaannangggntnccctttttaaannggggnncnnnnncccnannaaatttttnnnnnaaangntttn

SEQ ID NO: 372 - DNA, 256 bp, Homo Sapiens
  misc_feature (13)..(13): n is a, c, g, or t
  misc_feature (37)..(37): n is a, c, g, or t
  misc_feature (41)..(41): n is a, c, g, or t
aatataaaaattntttgctttgtgagcggatacaatntatngattaattgtgagcggataacaatttacacagaattcattaaagaggagaaattaactatgagaggatcgcatcaccatcaccatcacggatcctatttaggtgacactatagaatcgtcgacccacgcgtccggcggagtcgccgatcccgccggaagcgccaggacaatggggacccgggacgacgagtacgactacctattcaaagtggtgc

SEQ ID NO: 373 - DNA, 256 bp, Homo Sapiens
  misc_feature (2)..(2): n is a, c, g, or t
tnagaggagaaattaactatgagaggatcgcatcaccatcaccatcacggatcctatttaggtgacactatagaatcgtcgacccacgcgtccgatggattcaagcctcgtgaacgaagcggtggggagcaggcacaggactgggatgctctgccacccaagcggccccgactaggggcaggaaacaagatcggaggccgtaggcttattgtggtgctggaaggggccagtctggagacagtcaaggtagggaaga

SEQ ID NO: 374 - DNA, 256 bp, Homo Sapiens
ttagagaaattactatgagaggatcgcatcaccatcaccatcacggatcctatttaggtgacactatagaatcgtcgacccacgcgtccgtggtgaagagcatcgaaggggatcagagactggtggagagagcccagcgcctggaccaggagcttctgcaggctctggagaaagaggagaagaggaacccgcaggtggtccaaaccagccctcgtcactccccacaccacgtggttaggtgggtagaccccacagc

SEQ ID NO: 375 - DNA, 256 bp, Homo Sapiens
  misc_feature (3)..(3): n is a, c, g, or t
  misc_feature (19)..(19): n is a, c, g, or t
  misc_feature (21)..(21): n is a, c, g, or t
  misc_feature (41)..(41): n is a, c, g, or t
ttntttaagaggagaaatnantctgagaggatcgcataccntacctacggatcctatttaggtgacactatagaatcgtcgacccacgcgtccgcgggagccgcagctatggagccgcaggaggagagagaaacgcaggttgctgcgtggttaaaaaaaatatttggagatcatcctattccacagtatgaggtgaacccacggaccacagagattttacatcacctttcagaacgcaacagggtccgggacaggg

SEQ ID NO: 376 - DNA, 1210 bp, Homo Sapiens
  misc_feature (1)..(1): n is a, c, g, or t
  misc_feature (842)..(842): n is a, c, g, or t
  misc_feature (912)..(912): n is a, c, g, or t
  misc_feature (934)..(934): n is a, c, g, or t
  misc_feature (936)..(936): n is a, c, g, or t
  misc_feature (940)..(940): n is a, c, g, or t
  misc_feature (944)..(944): n is a, c, g, or t
  misc_feature (953)..(953): n is a, c, g, or t
  misc_feature (959)..(959): n is a, c, g, or t
  misc_feature (981)..(981): n is a, c, g, or t
  misc_feature (988)..(988): n is a, c, g, or t
  misc_feature (995)..(995): n is a, c, g, or t
  misc_feature (1028)..(1028): n is a, c, g, or t
  misc_feature (1050)..(1050): n is a, c, g, or t
  misc_feature (1054)..(1054): n is a, c, g, or t
  misc_feature (1059)..(1059): n is a, c, g, or t
  misc_feature (1075)..(1076): n is a, c, g, or t
  misc_feature (1087)..(1088): n is a, c, g, or t
  misc_feature (1098)..(1098): n is a, c, g, or t
  misc_feature (1130)..(1130): n is a, c, g, or t
  misc_feature (1133)..(1133): n is a, c, g, or t
  misc_feature (1137)..(1137): n is a, c, g, or t
  misc_feature (1139)..(1139): n is a, c, g, or t
  misc_feature (1162)..(1162): n is a, c, g, or t
  misc_feature (1166)..(1166): n is a, c, g, or t
  misc_feature (1170)..(1170): n is a, c, g, or t
  misc_feature (1178)..(1178): n is a, c, g, or t
  misc_feature (1185)..(1186): n is a, c, g, or t
  misc_feature (1188)..(1188): n is a, c, g, or t
  misc_feature (1198)..(1198): n is a, c, g, or t
naattagagaaattactatgagaggatcgcatcaccatcaccatcacggatcctatttaggtgacactatagaatcgtcgacccacgcgtccgccgacaaatgcaaatgcgtggacttccagaccctgaagctgcaggagctgcctgatgcagtcccccacggggagatgcccagacacatgcagctctactgcgacaggtacctgtgtgacaaggtcgtccctgggaacagggttaccatcatgggcatctactccatcaagaagtttggcctgactaccagcaggggccgtgacagggtgggcgtgggcatccgaagctcctacatccgtgtcctgggcatccaggtggacacagatggctctggccgcagctttgctggggccgtgagcccccaggaggaggaggagttccgtcgcctggctgccctcccaaatgtctatgaggtcatctccaagagcatcgccccctccatctttgggggcacagacatgaagaaggccattgcctgcctgctctttgggggctcccgaaagaggctccctgatggacttactcgccgaggagacatcaacctgctgatgctaggggaccctgggacagccaagtcccagcttctgaagtttgtggagaagtgttctcccattggggtatacacgtctgggaaaggcagcagcgcagctggactgacagcctcggtgatgagggacccttcgtcccggaatttcatcatggagggcggagccatggtcctggccgatggtggggtcgtctgtattgacgagtttgacaagatgcgagaagatgaccgtgtggcaatccacgaagccatggagcagcanaccatctctatcgccaaggctgggatcaccaccacccctgaactcccgctgctccgtcctggctgctgcnactcagtgttcggccgctggantnaaanaaanggggaaganaacatngacttctgcccccatcttgtcncgcttcnaatgatnttctcgtcaggatgacccaatgagaaaggattnatgctggccaacttgtttcctntgcngggancgcattgaaaaaaacnnggttgggaggnnaattgactgncaaactaaaaatttttgctatgccaagaaatnggncccngntttcaaaagtgaaaaaatgaaancctntttntttggganggggccnnancaaaaaaaangaaccccccccc

SEQ ID NO: 377 - DNA, 1200 bp, Homo Sapiens
  misc_feature (766)..(766): n is a, c, g, or t
  misc_feature (788)..(788): n is a, c, g, or t
  misc_feature (814)..(814): n is a, c, g, or t
  misc_feature (824)..(824): n is a, c, g, or t
  misc_feature (831)..(831): n is a, c, g, or t
  misc_feature (838)..(838): n is a, c, g, or t
  misc_feature (849)..(849): n is a, c, g, or t
  misc_feature (869)..(869): n is a, c, g, or t
  misc_feature (888)..(888): n is a, c, g, or t
  misc_feature (890)..(890): n is a, c, g, or t
  misc_feature (924)..(924): n is a, c, g, or t
  misc_feature (929)..(929): n is a, c, g, or t
  misc_feature (963)..(963): n is a, c, g, or t
  misc_feature (968)..(968): n is a, c, g, or t
  misc_feature (976)..(976): n is a, c, g, or t
  misc_feature (978)..(978): n is a, c, g, or t
  misc_feature (1001)..(1001): n is a, c, g, or t
  misc_feature (1008)..(1008): n is a, c, g, or t
  misc_feature (1014)..(1015): n is a, c, g, or t
  misc_feature (1028)..(1028): n is a, c, g, or t
  misc_feature (1039)..(1039): n is a, c, g, or t
  misc_feature (1045)..(1045): n is a, c, g, or t
  misc_feature (1049)..(1050): n is a, c, g, or t
  misc_feature (1057)..(1058): n is a, c, g, or t
  misc_feature (1060)..(1060): n is a, c, g, or t
  misc_feature (1084)..(1084): n is a, c, g, or t
  misc_feature (1094)..(1095): n is a, c, g, or t
  misc_feature (1100)..(1100): n is a, c, g, or t
  misc_feature (1109)..(1109): n is a, c, g, or t
  misc_feature (1111)..(1112): n is a, c, g, or t
  misc_feature (1114)..(1114): n is a, c, g, or t
  misc_feature (1116)..(1116): n is a, c, g, or t
  misc_feature (1126)..(1126): n is a, c, g, or t
  misc_feature (1156)..(1156): n is a, c, g, or t
  misc_feature (1171)..(1172): n is a, c, g, or t
  misc_feature (1175)..(1176): n is a, c, g, or t
  misc_feature (1185)..(1187): n is a, c, g, or t
  misc_feature (1192)..(1193): n is a, c, g, or t
  misc_feature (1198)..(1198): n is a, c, g, or t
atagagagattactatgagaggatcgcatcaccatcaccatcacggatcctatttaggtgacactatagaatcgtcgacccacgcgtccgcccacctttgcagatatctgcacctcaggagagactgtattccacgtggattgggggctccatccttgcctccctggacacctttaagaagatgtgggtctccaaaaaggaatatgaggaagacggtgcccgatccatccacagaaaaaccttctaatgtcgggacatcatcttcacctctctctgaagttaactccactttaaaactcgctttcttgagtcggagtgtttgcgaggaactgcctgtgtgtgagtgcgtgtgtggatatgagtgtgtgtgcacatgcgagtgccgtgtggccctgggaccctgggcccagaaaggacgatgaactacctgcagtggtgatggcctgaggcctggggttgaccactaactggctcctgacagggaagagcgctggcagaggctgtgctccctcctcaggtggcctctggctggctgtgggggactccgtttactaccacagggagacagagggaggtaagccatcccccgggagaccttgctgctgaccatcctaggctgggctggccccaccctcacccccacccccagggtgccctgaggccccaggcagctgctgcctccactatcgatgcctcctgactgcacactgaggactgggactggggttgagttctgtctggttttgttgccattttggtttgggangctggaaaagcacccccaaganctattacagagactggaagtcagganaaagcaggangccctcnttgttcnccaaggaacangaccacaccggcccactggnaggagggcaggaaacaatncntccctctgaatggctgcaaaattaatgttcccancccantcccctttcgggggccttgggaaaatttaaagcncctgntgtttccngnaacctccctttcatctgttcttnttgcaangccatnnttaaaccgttttnttttattgaanggtttnttcnnttagggnntngaaaaaaagaaacttggctgcccncccgcccttnntaccnaaaggtttnanncncnaaacttaacnccccggggccccccctcccccccttaaggnaactaaaatcccctnnaanngaaaaaacnnnatttnnaagtncc

SEQ ID NO: 378 - DNA, 1185 bp, Homo Sapiens
  misc_feature (916)..(916): n is a, c, g, or t
  misc_feature (927)..(927): n is a, c, g, or t
  misc_feature (950)..(950): n is a, c, g, or t
  misc_feature (976)..(976): n is a, c, g, or t
  misc_feature (983)..(983): n is a, c, g, or t
  misc_feature (988)..(988): n is a, c, g, or t
  misc_feature (990)..(990): n is a, c, g, or t
  misc_feature (997)..(997): n is a, c, g, or t
  misc_feature (1012)..(1012): n is a, c, g, or t
  misc_feature (1017)..(1017): n is a, c, g, or t
  misc_feature (1027)..(1027): n is a, c, g, or t
  misc_feature (1031)..(1031): n is a, c, g, or t
  misc_feature (1036)..(1036): n is a, c, g, or t
  misc_feature (1052)..(1052): n is a, c, g, or t
  misc_feature (1073)..(1073): n is a, c, g, or t
  misc_feature (1079)..(1079): n is a, c, g, or t
  misc_feature (1084)..(1084): n is a, c, g, or t
  misc_feature (1088)..(1088): n is a, c, g, or t
  misc_feature (1098)..(1098): n is a, c, g, or t
  misc_feature (1100)..(1100): n is a, c, g, or t
  misc_feature (1113)..(1113): n is a, c, g, or t
  misc_feature (1116)..(1116): n is a, c, g, or t
  misc_feature (1142)..(1142): n is a, c, g, or t
  misc_feature (1161)..(1161): n is a, c, g, or t
  misc_feature (1165)..(1165): n is a, c, g, or t
  misc_feature (1174)..(1174): n is a, c, g, or t
  misc_feature (1176)..(1176): n is a, c, g, or t
  misc_feature (1178)..(1178): n is a, c, g, or t
  misc_feature (1180)..(1180): n is a, c, g, or t
gagaaattactatgagaggatcgcatcaccatcaccatcacggatcctatttaggtgacactatagaatcgtcgacccacgcgtccgagcagttcacagaaaaaatgcagtcagatatggagaaaatccaagaattaagagaggctcagttatactcagtggacgtgactctggacccagacacggcctaccccagcctgatcctctctgataatctgcggcaagtgcggtacagttacctccaacaggacctgcctgacaaccccgagaggttcaatctgtttccctgtgtcttgggctctccatgcttcatcgccgggagacattattgggaggtagaggtgggagataaagccaagtggaccataggtgtctgtgaagactcagtgtgcagaaaaggtggagtaacctcagccccccagaatggattctgggcagtgtctttgtggtatgggaaagaatattgggctcttacctccccaatgactgccctacccctgcggaccccgctccagcgggtggggattttcttggactatgatgctggtgaggtctccttctacaacgtgacagagaggtgtcacaccttcactttctctcatgctaccttttgtgggcctgtccggccctacttcagtctgagttactcgggagggaaaagtgcagctcctctgatcatctgccccatgagtgggatagatgggttttctggccatgttgggaatcatggtcattccatggagacctccccttgaggaggtgaattcaggccaaaagggctgttggctgtaatcctacgccaggcacaaggcatcttgttgccttgccacgtcctgtcacagctgggtatccttaccatgttccacgcccttgcagtgggagacaggatgtccatgttctctaccatcctttttcnttcccatgcanattgggaaatgtaatgagatgtntcaagatatcctaaaataaaaaccanatgtccncctcngngtttcanactttcgggtttacncatcnctggaggganaaanagtangaaaatctttggattnggaagccgttcaaaaacttcnagcttntgggntcancctggcttcntntggttcaaccccnaanaaggattagggctattggtggcattntggggctagggctcctttntaanacctaaacngnananggccg

SEQ ID NO: 379 - DNA, 1200 bp, Homo Sapiens
  misc_feature (2)..(2): n is a, c, g, or t
  misc_feature (4)..(4): n is a, c, g, or t
  misc_feature (221)..(221): n is a, c, g, or t
  misc_feature (258)..(258): n is a, c, g, or t
  misc_feature (311)..(311): n is a, c, g, or t
  misc_feature (314)..(314): n is a, c, g, or t
  misc_feature (860)..(860): n is a, c, g, or t
  misc_feature (896)..(896): n is a, c, g, or t
  misc_feature (906)..(906): n is a, c, g, or t
  misc_feature (923)..(923): n is a, c, g, or t
  misc_feature (928)..(928): n is a, c, g, or t
  misc_feature (969)..(969): n is a, c, g, or t
  misc_feature (973)..(973): n is a, c, g, or t
  misc_feature (991)..(991): n is a, c, g, or t
  misc_feature (997)..(997): n is a, c, g, or t
  misc_feature (1006)..(1006): n is a, c, g, or t
  misc_feature (1008)..(1008): n is a, c, g, or t
  misc_feature (1021)..(1021): n is a, c, g, or t
  misc_feature (1032)..(1032): n is a, c, g, or t
  misc_feature (1038)..(1038): n is a, c, g, or t
  misc_feature (1040)..(1040): n is a, c, g, or t
  misc_feature (1042)..(1042): n is a, c, g, or t
  misc_feature (1056)..(1056): n is a, c, g, or t
  misc_feature (1064)..(1064): n is a, c, g, or t
  misc_feature (1066)..(1067): n is a, c, g, or t
  misc_feature (1082)..(1082): n is a, c, g, or t
  misc_feature (1086)..(1086): n is a, c, g, or t
  misc_feature (1121)..(1121): n is a, c, g, or t
  misc_feature (1134)..(1134): n is a, c, g, or t
  misc_feature (1137)..(1137): n is a, c, g, or t
  misc_feature (1141)..(1141): n is a, c, g, or t
  misc_feature (1155)..(1155): n is a, c, g, or t
  misc_feature (1160)..(1161): n is a, c, g, or t
  misc_feature (1166)..(1166): n is a, c, g, or t
  misc_feature (1168)..(1171): n is a, c, g, or t
  misc_feature (1180)..(1180): n is a, c, g, or t
  misc_feature (1185)..(1186): n is a, c, g, or t
  misc_feature (1188)..(1188): n is a, c, g, or t
  misc_feature (1196)..(1196): n is a, c, g, or t
  misc_feature (1199)..(1200): n is a, c, g, or t
gnantagagaaattactatgagaggatcgcatcaccatcaccatcacggatcctatttaggtgacactatagaatcgtcgacccacgcgtccgatccctcgcttcagattgacatacctgatgcgctcagtgagagagacaaagtcaaatttacagtgcacacaaagattccacctgctcctacgaagcccgactttgatggtcctcgagagaagatgcanaaactgggagaaggtgaagggtctatgaccaaagaanaatttgccaagatgaaacaagaactggaagctgagtatctcgctgtgtttaanaanactgtgtcctcccatgaagtctttcttcagcggctttcttctcaccctgttctcagtaaagatcgcaactttcatgttttcctggaatatgatcaggatctaagtgttaggcggaaaaatactaaagaaatgtttggtggcttcttcaaaagtgtggtgaaaagtgctgatgaagtcctttttactggagttaaggaggtagatgacttctttgagcaagagaagaacttccttattaactattacaataggatcaaagattcttgtgtgaaagctgacaaaatgaccagatctcataaaaatgttgccgatgactatatccacaccgcagcctgcttacatagcctggctttagaagagcccacagtcatcaaaaagtacctattgaaggttgctgagctatttgaaaaactaaggaaagtagagggtcgagtttcatcagatgaagatttgaagctaacagagctcctccgatactacatgctcaacattgaagctgctaaggatctcttatacagacgcaccaaagccctcattgactatganaactcaaacaaagctctggataaggcccggttaaanagcaaagacntcaagttggctgaggcncccancaggagtgctgccaaaatttgaacaactttccgaatctgcnaaanaaaactgaaaatttcaancggaanaaagggccncntttaaaaaaatcnaattgaaatgnccggancngnaaaaaaacatgccnggaaacangnncccctttttgcaaanctgnattgacttgttcaaaaaaactgaaatgccctcccncaaaaaaaaaaangangggnaaaaaaacccaccnccctnnccttnannnnttccccggnaaaanntncccccccnttnn

SEQ ID NO: 380 - DNA, 256 bp, Homo Sapiens
ttgaaagtgtgatgaacagtgtggtatccctactcttgatcctggaaccagacaagcaagaagctttgattgaaagcctatgtgaaaagctggtcaaatttcgcgaaggtgaacgcccgtctctgagactgcagttgttaagcaaccttttccacgggatggataagaatactcctgtaagatacacagtgtattgcagccttattaaagtggcagcatcttgtggggccatccagtacatcccaactgagctgga

SEQ ID NO: 381 - DNA, 1203 bp, Homo Sapiens
  misc_feature (2)..(10): n is a, c, g, or t
  misc_feature (892)..(892): n is a, c, g, or t
  misc_feature (901)..(901): n is a, c, g, or t
  misc_feature (925)..(925): n is a, c, g, or t
  misc_feature (969)..(969): n is a, c, g, or t
  misc_feature (971)..(971): n is a, c, g, or t
  misc_feature (978)..(978): n is a, c, g, or t
  misc_feature (984)..(984): n is a, c, g, or t
  misc_feature (987)..(987): n is a, c, g, or t
  misc_feature (996)..(996): n is a, c, g, or t
  misc_feature (1008)..(1008): n is a, c, g, or t
  misc_feature (1017)..(1017): n is a, c, g, or t
  misc_feature (1020)..(1020): n is a, c, g, or t
  misc_feature (1026)..(1026): n is a, c, g, or t
  misc_feature (1029)..(1029): n is a, c, g, or t
  misc_feature (1033)..(1033): n is a, c, g, or t
  misc_feature (1036)..(1036): n is a, c, g, or t
  misc_feature (1043)..(1044): n is a, c, g, or t
  misc_feature (1046)..(1046): n is a, c, g, or t
  misc_feature (1092)..(1092): n is a, c, g, or t
  misc_feature (1097)..(1097): n is a, c, g, or t
  misc_feature (1101)..(1102): n is a, c, g, or t
  misc_feature (1109)..(1109): n is a, c, g, or t
  misc_feature (1135)..(1135): n is a, c, g, or t
  misc_feature (1140)..(1140): n is a, c, g, or t
  misc_feature (1144)..(1144): n is a, c, g, or t
  misc_feature (1156)..(1156): n is a, c, g, or t
  misc_feature (1160)..(1160): n is a, c, g, or t
  misc_feature (1162)..(1162): n is a, c, g, or t
  misc_feature (1171)..(1172): n is a, c, g, or t
  misc_feature (1174)..(1174): n is a, c, g, or t
  misc_feature (1185)..(1185): n is a, c, g, or t
  misc_feature (1193)..(1193): n is a, c, g, or t
  misc_feature (1198)..(1199): n is a, c, g, or t
tnnnnnnnnnaatagagaaattactatgagaggatcgcatcaccatcaccattcacggatcctatttaggtgacactatagaatcgtcgacccacgcgtccgcccacgcgtccggggcctcgctgcaggacctgaagactgtggtcatcgccaagacccccgggacgggaggcagcccccagggctcctttgcggatggccagcctgccgagcgcagggccagcaatgaccagcgtccccaggaggtcccagcagaggctctggccccggccccagtggaagtcccagctccagcccctgcagcagcctcagcctcaggcccagcgaagactccggccccagcagaggcctcaacttcagctttggtcccagaggagacgccagtggaagctccagccccacccccagccgaggcccctgcccagtacccgagtgagcacctcatccaggccacctcggaggagaatcagatcccctcgcacttgcctgcctgcccgtcgctccggcacgtcgccagcctgcggggcagcgccatcatcgagctcttccacagcagcattgctgaggttgaaaacgaggagctgaggcacctcatgtggtcctcggtggtgttctaccagaccccagggctggaggtgactgcctgcgtgctgctctccaccaaggctgtgtactttgtgctccacgacggcctccgccgctacttctcagagccactgcaggatttctggcatcagaaaaacaccgactacaacaacagccctttccacatctcccagtgcttcgtgctaaagcttagtgacctgcagtcagtcaatgtggggcttttcgaccagcatttccggctgacgggttccaccccgatgcaggtggtcacgtgcttgacgcgggnacagctacntgacgcactgcttcctccagcacntcatggtcgtgctgtcctctctggaacgcacgccctccccggancntgttganaagganttntactccgantttgggaacaanacccagggnaanatgganaantacnagntgatccnntntagtcgggtaaggtttacttaccccagtgaggaagaaattgggganctgantttnnctgtggnccaaaaaatggttgaaccaaaaaggncccancctnaaatttttgttntaantngaggctttnnangggggatgccnccctgggngttgnngggc

SEQ ID NO: 382 - DNA, 1407 bp, Homo Sapiens
  misc_feature (927)..(927): n is a, c, g, or t
  misc_feature (936)..(936): n is a, c, g, or t
  misc_feature (999)..(999): n is a, c, g, or t
  misc_feature (1001)..(1001): n is a, c, g, or t
  misc_feature (1015)..(1015): n is a, c, g, or t
  misc_feature (1024)..(1024): n is a, c, g, or t
  misc_feature (1034)..(1034): n is a, c, g, or t
  misc_feature (1044)..(1044): n is a, c, g, or t
  misc_feature (1056)..(1056): n is a, c, g, or t
  misc_feature (1065)..(1065): n is a, c, g, or t
  misc_feature (1068)..(1068): n is a, c, g, or t
  misc_feature (1070)..(1070): n is a, c, g, or t
  misc_feature (1079)..(1079): n is a, c, g, or t
  misc_feature (1081)..(1081): n is a, c, g, or t
  misc_feature (1083)..(1083): n is a, c, g, or t
  misc_feature (1130)..(1130): n is a, c, g, or t
  misc_feature (1139)..(1139): n is a, c, g, or t
  misc_feature (1158)..(1159): n is a, c, g, or t
  misc_feature (1172)..(1172): n is a, c, g, or t
  misc_feature (1176)..(1176): n is a, c, g, or t
  misc_feature (1188)..(1192): n is a, c, g, or t
  misc_feature (1195)..(1195): n is a, c, g, or t
  misc_feature (1197)..(1198): n is a, c, g, or t
  misc_feature (1204)..(1205): n is a, c, g, or t
  misc_feature (1208)..(1208): n is a, c, g, or t
  misc_feature (1210)..(1212): n is a, c, g, or t
  misc_feature (1216)..(1216): n is a, c, g, or t
  misc_feature (1219)..(1220): n is a, c, g, or t
  misc_feature (1234)..(1234): n is a, c, g, or t
  misc_feature (1241)..(1241): n is a, c, g, or t
  misc_feature (1254)..(1254): n is a, c, g, or t
  misc_feature (1257)..(1257): n is a, c, g, or t
  misc_feature (1261)..(1261): n is a, c, g, or t
  misc_feature (1268)..(1268): n is a, c, g, or t
  misc_feature (1270)..(1270): n is a, c, g, or t
  misc_feature (1274)..(1274): n is a, c, g, or t
  misc_feature (1278)..(1278): n is a, c, g, or t
  misc_feature (1282)..(1283): n is a, c, g, or t
  misc_feature (1295)..(1296): n is a, c, g, or t
  misc_feature (1298)..(1299): n is a, c, g, or t
  misc_feature (1308)..(1308): n is a, c, g, or t
  misc_feature (1312)..(1313): n is a, c, g, or t
  misc_feature (1316)..(1316): n is a, c, g, or t
  misc_feature (1331)..(1331): n is a, c, g, or t
  misc_feature (1346)..(1346): n is a, c, g, or t
  misc_feature (1353)..(1353): n is a, c, g, or t
  misc_feature (1360)..(1361): n is a, c, g, or t
  misc_feature (1366)..(1369): n is a, c, g, or t
  misc_feature (1385)..(1385): n is a, c, g, or t
  misc_feature (1394)..(1394): n is a, c, g, or t
  misc_feature (1397)..(1397): n is a, c, g, or t
  misc_feature (1399)..(1399): n is a, c, g, or t
tagagaaattactatgagaggatcgcatcaccatcaccatcacggatcctatttaggtgacactatagaatcgtcgacccacgcgtccgctctggttctcgggacagcagccacggttctgcagcagggcagcttcagtgtggatgacgtgcagactgtgagtgcaggagcattaggctgtctggtggctctgcccatgaagaacttgagtgacgacccactggctttgacctccaatagtaacttagcagcacatatcaccacaccgacctcttcgagcaccccccgagaaaatgccagtgtcccggaactgctggctccaatcaaggtggagccggactcgccttctcgcccaggagcagttgggcagcaggaaggaagccatgggctgccccagtccacgttgcccagtccagcagagcagcacggtgcccaggacacagagctcagtgcaggcactggcaacttctatttggaaagtgggggctcagcaagaactgattaccgagccattcaactagccaaggaaaaaaagcagagaggagcggggagcaatgcaggtgaggccgtgtgtgctgcagccggacgagcaagggcctgagggttctctgtcactgttactggcagaagaaacacagcaggtgtttctgtgctcttggttttacttttctgttcagaatacccttttatcaactccttagttttatttgaacttaagggaaaaaattagtaacaaaattcccagcatcagtatgaacatattttatttgcctaaacaagctttgtgaaagttaagcgttcaaacaccagtgtcagttacctggaaggctactaaggtaaataagcaaagcaggccagttgtcaggaaagcagagattgtgcctggtgctgaatggccttgggggcctgatcttggcatggcaaaanacctggggnactgccactgttccccaggtacgtgtacatggagcccaaactgtgtgttcctgtggcatttgncnaatttttgttgaantcttatttnaaaatgttancaacttactngcattttttaanaaccaaaanaananctggtaacntntnggcctcaagcatttgttctttcttaaaatgaaaaaatgggaattagngcttaaagnaaactgcttaatttttttnntaaaaactaacgnggantttttaaatttnnnnnaanannaaaaannaanannnaaanggnncccccccccaaagngcccaantaacttaattacnganctgncccccgntnaaancccnaaannccccaaaccccnngnntttttcaancccnnttncccgggggttttttngggaaaacccccccntgggganttttcgnncgggnnnnagggaaaaaaccgggnaccccgttnaancncgggctca

SEQ ID NO: 383 - DNA, 1292 bp, Homo Sapiens
  misc_feature (1)..(1): n is a, c, g, or t
  misc_feature (672)..(672): n is a, c, g, or t
  misc_feature (711)..(711): n is a, c, g, or t
  misc_feature (718)..(718): n is a, c, g, or t
  misc_feature (744)..(744): n is a, c, g, or t
  misc_feature (807)..(807): n is a, c, g, or t
  misc_feature (809)..(809): n is a, c, g, or t
  misc_feature (812)..(812): n is a, c, g, or t
  misc_feature (828)..(828): n is a, c, g, or t
  misc_feature (830)..(830): n is a, c, g, or t
  misc_feature (840)..(840): n is a, c, g, or t
  misc_feature (843)..(843): n is a, c, g, or t
  misc_feature (864)..(864): n is a, c, g, or t
  misc_feature (890)..(890): n is a, c, g, or t
  misc_feature (901)..(901): n is a, c, g, or t
  misc_feature (905)..(905): n is a, c, g, or t
  misc_feature (909)..(910): n is a, c, g, or t
  misc_feature (912)..(913): n is a, c, g, or t
  misc_feature (915)..(915): n is a, c, g, or t
  misc_feature (919)..(922): n is a, c, g, or t
  misc_feature (926)..(928): n is a, c, g, or t
  misc_feature (931)..(932): n is a, c, g, or t
  misc_feature (935)..(936): n is a, c, g, or t
  misc_feature (938)..(939): n is a, c, g, or t
  misc_feature (943)..(944): n is a, c, g, or t
  misc_feature (956)..(956): n is a, c, g, or t
  misc_feature (958)..(958): n is a, c, g, or t
  misc_feature (966)..(967): n is a, c, g, or t
  misc_feature (969)..(969): n is a, c, g, or t
  misc_feature (971)..(973): n is a, c, g, or t
  misc_feature (983)..(983): n is a, c, g, or t
  misc_feature (985)..(986): n is a, c, g, or t
  misc_feature (990)..(996): n is a, c, g, or t
  misc_feature (1006)..(1006): n is a, c, g, or t
  misc_feature (1008)..(1009): n is a, c, g, or t
  misc_feature (1013)..(1014): n is a, c, g, or t
  misc_feature (1019)..(1019): n is a, c, g, or t
  misc_feature (1021)..(1023): n is a, c, g, or t
  misc_feature (1025)..(1025): n is a, c, g, or t
  misc_feature (1027)..(1027): n is a, c, g, or t
  misc_feature (1029)..(1034): n is a, c, g, or t
  misc_feature (1036)..(1036): n is a, c, g, or t
  misc_feature (1038)..(1040): n is a, c, g, or t
  misc_feature (1042)..(1048): n is a, c, g, or t
  misc_feature (1058)..(1058): n is a, c, g, or t
  misc_feature (1061)..(1061): n is a, c, g, or t
  misc_feature (1063)..(1066): n is a, c, g, or t
  misc_feature (1068)..(1069): n is a, c, g, or t
  misc_feature (1073)..(1074): n is a, c, g, or t
  misc_feature (1078)..(1080): n is a, c, g, or t
  misc_feature (1087)..(1088): n is a, c, g, or t
  misc_feature (1090)..(1091): n is a, c, g, or t
  misc_feature (1093)..(1094): n is a, c, g, or t
  misc_feature (1096)..(1107): n is a, c, g, or t
  misc_feature (1110)..(1110): n is a, c, g, or t
  misc_feature (1112)..(1113): n is a, c, g, or t
  misc_feature (1123)..(1123): n is a, c, g, or t
  misc_feature (1125)..(1139): n is a, c, g, or t
  misc_feature (1142)..(1147): n is a, c, g, or t
  misc_feature (1149)..(1149): n is a, c, g, or t
  misc_feature (1151)..(1154): n is a, c, g, or t
  misc_feature (1156)..(1164): n is a, c, g, or t
  misc_feature (1166)..(1169): n is a, c, g, or t
  misc_feature (1171)..(1171): n is a, c, g, or t
  misc_feature (1173)..(1180): n is a, c, g, or t
  misc_feature (1182)..(1189): n is a, c, g, or t
  misc_feature (1192)..(1211): n is a, c, g, or t
  misc_feature (1213)..(1213): n is a, c, g, or t
  misc_feature (1216)..(1224): n is a, c, g, or t
  misc_feature (1228)..(1229): n is a, c, g, or t
  misc_feature (1232)..(1237): n is a, c, g, or t
  misc_feature (1241)..(1246): n is a, c, g, or t
  misc_feature (1248)..(1262): n is a, c, g, or t
  misc_feature (1267)..(1291): n is a, c, g, or t
naattagagaaattactatgagaggatcgcatcaccatcaccatcacggatcctatttaggtgacactatagaatcgtcgacccacgcgtccgggccgagcacgagggggctgcgcgcagctccgggcagggaccccgtctgcaccgggtggcctgcaagattgccggggtaggcagggggaggagaacgctcacccgttccggtctggcgctcccttttctccacacccacacgcctcccgctccacgctggcggcgcagctgctcccgctgccacagccgccaccgccgccgaagctcgcgccgccgccgctgccgccttggctgagcgcggtcacgtgacgcgatccgcggggagcctgggggcgggcgagtgcgcgcgcgcgcgcgcggaggaaccgcggctcggaccgggactgggagctgagcggcactgggagggcgtttaaggggaggacccggcgagcgcgccctcggctggcgagcgcgcgcctggcgattagaacttgccgcgcggtcgggaaagggtggccggagtgaggggcggaggtggggacttgcgcctccgcacgcccctccctttcttccttcccctgagcgccttggcttgccgctgcccccgccccctccagcgcgccccttccctcctgccgcagcctgcgattggctganaggctctgacgtccgtgtttccatgacgtgttggtgcangaaggancggcgggggaagaaggggtggccagncgcgcggggaggtgactccgtcagtcacagctgctgtttcggcgcggggccgggccgctgccncnacntgtggaggcaggaaancnatgattgccncangaaaaatgcgggcgccccttnactggggccctccgaaccgccccggnccatgccctcnaggnccannannancaannnnaagnnnagnnaanncnnctgnnagaaaaaataangnaaaccccnntnannnaaattttaangnntctnnnnnnnttttgcccantnnaaannaattnannncntncnnnnnntnannnannnnnnnaaaaaaaatnttntnnnntnntccnntttnnnaaaaaanntnntnncnnnnnnnnnnnnaantnntttttttttntnnnnnnnnnnnnnnnaannnnnnantnnnntnnnnnnnnnannnntnannnnnnnntnnnnnnnnaannnnnnnnnnnnnnnnnnnntnaannnnnnnnntttnnttnnnnnntttnnnnnnannnnnnnnnnnnnnnttttnnnnnnnnnnnnnnnnnnnnnnnnnt

SEQ ID NO: 384 - DNA, 1383 bp, Homo Sapiens
  misc_feature (3)..(3): n is a, c, g, or t
  misc_feature (484)..(484): n is a, c, g, or t
  misc_feature (568)..(568): n is a, c, g, or t
  misc_feature (605)..(605): n is a, c, g, or t
  misc_feature (627)..(627): n is a, c, g, or t
  misc_feature (712)..(712): n is a, c, g, or t
  misc_feature (731)..(731): n is a, c, g, or t
  misc_feature (778)..(778): n is a, c, g, or t
  misc_feature (803)..(803): n is a, c, g, or t
  misc_feature (821)..(821): n is a, c, g, or t
  misc_feature (828)..(828): n is a, c, g, or t
  misc_feature (833)..(833): n is a, c, g, or t
  misc_feature (883)..(883): n is a, c, g, or t
  misc_feature (888)..(888): n is a, c, g, or t
  misc_feature (890)..(890): n is a, c, g, or t
  misc_feature (893)..(893): n is a, c, g, or t
  misc_feature (903)..(903): n is a, c, g, or t
  misc_feature (905)..(905): n is a, c, g, or t
  misc_feature (921)..(921): n is a, c, g, or t
  misc_feature (925)..(926): n is a, c, g, or t
  misc_feature (929)..(929): n is a, c, g, or t
  misc_feature (936)..(936): n is a, c, g, or t
  misc_feature (961)..(962): n is a, c, g, or t
  misc_feature (979)..(979): n is a, c, g, or t
  misc_feature (1003)..(1003): n is a, c, g, or t
  misc_feature (1009)..(1009): n is a, c, g, or t
  misc_feature (1018)..(1018): n is a, c, g, or t
  misc_feature (1031)..(1031): n is a, c, g, or t
  misc_feature (1064)..(1064): n is a, c, g, or t
  misc_feature (1075)..(1075): n is a, c, g, or t
  misc_feature (1080)..(1080): n is a, c, g, or t
  misc_feature (1084)..(1084): n is a, c, g, or t
  misc_feature (1087)..(1087): n is a, c, g, or t
  misc_feature (1107)..(1107): n is a, c, g, or t
  misc_feature (1126)..(1126): n is a, c, g, or t
  misc_feature (1129)..(1129): n is a, c, g, or t
  misc_feature (1131)..(1131): n is a, c, g, or t
  misc_feature (1136)..(1136): n is a, c, g, or t
  misc_feature (1150)..(1150): n is a, c, g, or t
  misc_feature (1156)..(1157): n is a, c, g, or t
  misc_feature (1160)..(1160): n is a, c, g, or t
  misc_feature (1176)..(1177): n is a, c, g, or t
  misc_feature (1182)..(1182): n is a, c, g, or t
  misc_feature (1191)..(1191): n is a, c, g, or t
  misc_feature (1195)..(1195): n is a, c, g, or t
  misc_feature (1200)..(1200): n is a, c, g, or t
  misc_feature (1205)..(1205): n is a, c, g, or t
  misc_feature (1223)..(1223): n is a, c, g, or t
  misc_feature (1232)..(1232): n is a, c, g, or t
  misc_feature (1237)..(1237): n is a, c, g, or t
  misc_feature (1241)..(1241): n is a, c, g, or t
  misc_feature (1244)..(1244): n is a, c, g, or t
  misc_feature (1250)..(1250): n is a, c, g, or t
  misc_feature (1255)..(1255): n is a, c, g, or t
  misc_feature (1262)..(1262): n is a, c, g, or t
  misc_feature (1266)..(1266): n is a, c, g, or t
  misc_feature (1271)..(1271): n is a, c, g, or t
  misc_feature (1279)..(1280): n is a, c, g, or t
  misc_feature (1284)..(1284): n is a, c, g, or t
  misc_feature (1286)..(1287): n is a, c, g, or t
  misc_feature (1291)..(1291): n is a, c, g, or t
  misc_feature (1298)..(1298): n is a, c, g, or t
  misc_feature (1306)..(1306): n is a, c, g, or t
  misc_feature (1311)..(1311): n is a, c, g, or t
  misc_feature (1316)..(1317): n is a, c, g, or t
  misc_feature (1323)..(1325): n is a, c, g, or t
  misc_feature (1328)..(1328): n is a, c, g, or t
  misc_feature (1333)..(1333): n is a, c, g, or t
  misc_feature (1335)..(1336): n is a, c, g, or t
  misc_feature (1339)..(1339): n is a, c, g, or t
  misc_feature (1352)..(1352): n is a, c, g, or t
  misc_feature (1355)..(1355): n is a, c, g, or t
  misc_feature (1364)..(1365): n is a, c, g, or t
  misc_feature (1374)..(1374): n is a, c, g, or t
  misc_feature (1379)..(1380): n is a, c, g, or t
  misc_feature (1382)..(1382): n is a, c, g, or t
canttagagagaattactatgagaggatcgcatcaccatcaccatcacggatcctatttaggtgacactatagaatcgtcgacccacgcgtccgggaagcacaaaaagggacagtcggaagaaattcaaaagaaaagaacccgccgagcagtcaaattccagagggccattactggtgcatctcttgctgatataatggccaagaggaatcagaaacctgaagttagaaaggctcaacgagaacaagctatcagggctgctaaggaagcaaaaaaggctaagcaagcatctaaaaagactgcaatggctgctgctaaggcacctacaaaggcagcacctaagcaaaagattgtgaagcctgtgaaagtttcagctccccgagttggtggaaaacgctaaactggcagattagatttttaaataaagattggattataaaaaaaaaaaaaaaaaaaaaaaaaaaaaaaaaaaaaaaaaaaaaaangggcggccgctccctatagtgagtcgtattaagcttaattagctgagcttggactcctgttgatagatccagtaatgacctcanaactccatctggatttgttcaaaacgctcggttgccnccgggcgttttttattggtganaatccaagctagcttggcgagattttcaggagctaaggaagctaaaatggagaaaaaaatcactggatataccaccgttgatatntcccaatggcatcgtaaanaacattttgaggcatttcagtcagttgctcaatgtacctataaccanaccgttcagctggatattacggccntttttaaagaccgtaaanaaaaaanaagcncaagttttatccggcctttattccccattcttgcccgccctgaatgaaangctcntnccnggaattttcntnatggcaatgaaaaaancggnnganccttggngatatgggaaaagggttcccccctnnttaaccccgtttttccntggaccaaactggaaaacgttttncctccnctcttgggngggaaaaccccgncgaatttccgggcggttttctccccctttattnccccaaaaatngggcngggnttncgggggaaaaccctggcccnattttccctaaagggtttnttngnaaaantttttttccccccnccccannccngggggggatttccccnnttttnatttaaacngggnccaanagganaaattttttccccccccntttccccgnggggnaaanttnatcccnggggnaaagggnttanccccngggaattnngttncnngccntttgganggctcccnttccncaaanntttatnnnaancccancnncanagggggggggggncanttttttagnnatttggggnccccnncnc

SEQ ID NO: 385 - DNA, 256 bp, Homo Sapiens
  misc_feature (1)..(3): n is a, c, g, or t
nnnctatgagaggtcgcatcaccatcaccatcacggatcctatttaggtgacactatagaatcgtcgacccacgcgtccgaagacagggaagactatgtgccctacactggagaaaaaaaagggaaaatatttatccccaaacagaaacctgtacagacttttacagaagaaaaagtgtctcttgatccagaattagaagaagctttgacaagtgcttctgatacagaattgtgtgacctcgcagcaattcttggg

SEQ ID NO: 386 - DNA, 1171 bp, Homo Sapiens
  misc_feature (1)..(1): n is a, c, g, or t
  misc_feature (3)..(3): n is a, c, g, or t
  misc_feature (853)..(853): n is a, c, g, or t
  misc_feature (899)..(899): n is a, c, g, or t
  misc_feature (908)..(908): n is a, c, g, or t
  misc_feature (910)..(910): n is a, c, g, or t
  misc_feature (960)..(960): n is a, c, g, or t
  misc_feature (974)..(974): n is a, c, g, or t
  misc_feature (982)..(982): n is a, c, g, or t
  misc_feature (995)..(995): n is a, c, g, or t
  misc_feature (1010)..(1010): n is a, c, g, or t
  misc_feature (1017)..(1017): n is a, c, g, or t
  misc_feature (1020)..(1020): n is a, c, g, or t
  misc_feature (1022)..(1022): n is a, c, g, or t
  misc_feature (1036)..(1038): n is a, c, g, or t
  misc_feature (1047)..(1047): n is a, c, g, or t
  misc_feature (1064)..(1064): n is a, c, g, or t
  misc_feature (1072)..(1072): n is a, c, g, or t
  misc_feature (1074)..(1074): n is a, c, g, or t
  misc_feature (1083)..(1083): n is a, c, g, or t
  misc_feature (1097)..(1097): n is a, c, g, or t
  misc_feature (1102)..(1102): n is a, c, g, or t
  misc_feature (1104)..(1104): n is a, c, g, or t
  misc_feature (1106)..(1106): n is a, c, g, or t
  misc_feature (1110)..(1110): n is a, c, g, or t
  misc_feature (1115)..(1115): n is a, c, g, or t
  misc_feature (1131)..(1131): n is a, c, g, or t
  misc_feature (1150)..(1151): n is a, c, g, or t
  misc_feature (1154)..(1154): n is a, c, g, or t
  misc_feature (1164)..(1164): n is a, c, g, or t
  misc_feature (1168)..(1168): n is a, c, g, or t
  misc_feature (1171)..(1171): n is a, c, g, or t
nanttagagaaaattactatgagaggatcgcatcaccatcaccatcacggatcctatttaggtgacactatagaatcgtcgacccacgcgtccgaacaccttgaagagccaggagagacacaaaacgcttttctcaatgaaagaaagcaggcttcagctataaaaaaagaggagttagtggccagatcggaaacacatgctgccgggcattctcaggagaagacacatagccgagagaagagtagccaggagagtggagaggaggcagggagccaggagaatcacccccaggagtctaaaggccaaccccgaagccaggaagaatctgaggaaggtgaggaagatgccacctctgaggtggacaaacgacgcacgaggcccagacaccaccacgggaggagcaggcccgacaggtcctctcaaggagggagtcttccctctgaggaaaagggacacccccaggaggaatctgaggagtcaaacgtcagcatggccagtttaggggaaaagagggaccaccattcaacccactacagggcttcagaggaagaacctgaatatggagaagaaataaagggttatccaggcgtccaggcccctgaggacctggagtgggagcgctataggggcagagaaagtgaagaatacagggctccaagacctcagagtgaggagagttgggatgaggaggacaagagaaactaccccagcttagagcttgataagatggcacatggatatggtgaagaaagtgaggaagagaggggccttgagccgggaaagggacgccatcacagaggcaggggaggggagccacgtgcctatttcatgtctgacaccagagaagagaaangttcttgggtgaaggacaccccgtgtccaaaaaaccagatggacanggcaggagncntcccaaggtgcgtggaaagagctggacagaattatctcactacggtgagnaggaccccaggaantggcaccncagggaaactgcnggaccttaagaaacnggggganctngnttcagataacattnnnctccctccnccctgaaaaagaaaaanttagggantnttcaccctntacaacctttccgngaaancncntttnaaaanaacactgatgaatttntcaggtgagagaatgactnnttnacaaaaattntccnaan

SEQ ID NO: 387 - DNA, 256 bp, Homo Sapiens
  misc_feature (3)..(3): n is a, c, g, or t
gangacggatcgcatcaccatcaccatcacggatcctatttaggtgacactatagaatcgtcgacccacgcgtccggattaagcaatatagggtgcagtgtaagaagaaagaagataaaattggaaaagtgttgcccgttatgcatgagagtcaccatgctcaaagtgaatatattaagtccctaaaagataagttagtacaagagaaaaagctgtccaatatgtaccaagagcagtgcatttccttagaagaaga

SEQ ID NO: 388 - DNA, 256 bp, Homo Sapiens
  misc_feature (9)..(9): n is a, c, g, or t
tttagaggnaaattactatgagaggatcgcatcaccatcaccatcacggatcctatttaggtgacactatagaatcgtcgacccacgcgtccgggagaagcctttccagtgaccgtgggaggacaacccattcaccatatgaggaacggagtaggaccaagggcagtgggcagcagtcagagcggggctccgaccgcacccctgagcgcagccgcaaggagaaccactccagtgaagggaccaaggagtccagcag

SEQ ID NO: 389 - DNA, 256 bp, Homo Sapiens
acaccctgagctgcaagattgcagactttggcctagcacgcctcattgaggacaacgagtacacagccagggagggggccaagtttcccattaagtggacagcgccagaagccattaactacgggacattcaccatcaagtcagatgtgtggtcttttgggatcctgctgacggaaattgtcacccacggccgcatcccttacccagggatgaccaacccggaggtgattcagaacctggagcgaggctaccgcat

SEQ ID NO: 390 - DNA, 256 bp, Homo Sapiens
  misc_feature (16)..(16): n is a, c, g, or t
  misc_feature (18)..(18): n is a, c, g, or t
  misc_feature (22)..(22): n is a, c, g, or t
  misc_feature (38)..(38): n is a, c, g, or t
  misc_feature (51)..(51): n is a, c, g, or t
  misc_feature (244)..(248): n is a, c, g, or t
ttattaagaggagatntnactntgagaggatcgatacntacatacggatcntatttaggtgacactatagaatcgtcgacccacgcgtccgcggaaagcgagcgtatctcccgagccgttgccactgacagccgcgggcgctcccatctgagtaagagccagcccgtccgcggcctctccagccccgggttcgcgctctcgactctcctgcctgcccagctgcgcggcggagcggagcgaggcnnnnnctgcgagt

SEQ ID NO: 391 - DNA, 256 bp, Homo Sapiens
  misc_feature (1)..(3): n is a, c, g, or t
nnnctatgagaggatcgcatcaccatcaccatcacggatcctatttaggtgacactatagaatcgtcgacccacgcgtccgctccaacagacatcgctattgcggttccgaggcagtgggaagagatgcggcccctggacatcgtcgagctggcggaaccggaggaagtggaggtgctggagcccgaggaggatttcgagcagtttctgctcccggtcatcaacgagatgcgcgaggacatcgcgtcgctgacgcg

SEQ ID NO: 392 - DNA, 256 bp, Homo Sapiens
cagactactacaaaggcgaggagtccaacagctcagccaacaagtgtctgctgaaggtggctggttacgctgcgctgctggagcagtatcagaaggccattgacatctacgaacaggtggggaccaatgccatggacagccccctcctcaagtacagcgccaaagactacttcttcaaggcggccctctgccacttctgcatcgacatgctcaacgccaagctggctgtccaaaagtatgaggagctgttcccagc

SEQ ID NO: 393 - DNA, 256 bp, Homo Sapiens
aatttcaacacaaacaactgcacgagcgcgcacccaccgcgccggagccttgccccgatccgcgcccgccccgtccgtgcggcgcgcgggcggagacgccgtggccgcgccggagctcgggccgggggccaccatcgaggcgggggccgcgcgagggccggagcggagcggcgccgccaccgccgcacgcgcaaacttgggctcgcgcttcccggcccggcgcggagcccggggcgcccggagccccgccatgtcg

SEQ ID NO: 394 - DNA, 1584 bp, Homo Sapiens
  misc_feature (2)..(2): n is a, c, g, or t
  misc_feature (5)..(5): n is a, c, g, or t
  misc_feature (9)..(9): n is a, c, g, or t
  misc_feature (41)..(41): n is a, c, g, or t
  misc_feature (45)..(45): n is a, c, g, or t
  misc_feature (49)..(49): n is a, c, g, or t
  misc_feature (57)..(57): n is a, c, g, or t
  misc_feature (68)..(68): n is a, c, g, or t
  misc_feature (78)..(78): n is a, c, g, or t
  misc_feature (98)..(98): n is a, c, g, or t
  misc_feature (103)..(103): n is a, c, g, or t
  misc_feature (106)..(108): n is a, c, g, or t
  misc_feature (122)..(122): n is a, c, g, or t
  misc_feature (128)..(128): n is a, c, g, or t
  misc_feature (135)..(135): n is a, c, g, or t
  misc_feature (139)..(139): n is a, c, g, or t
  misc_feature (146)..(146): n is a, c, g, or t
  misc_feature (151)..(151): n is a, c, g, or t
  misc_feature (156)..(157): n is a, c, g, or t
  misc_feature (162)..(162): n is a, c, g, or t
  misc_feature (165)..(165): n is a, c, g, or t
  misc_feature (170)..(170): n is a, c, g, or t
  misc_feature (186)..(186): n is a, c, g, or t
  misc_feature (193)..(193): n is a, c, g, or t
  misc_feature (196)..(196): n is a, c, g, or t
  misc_feature (206)..(206): n is a, c, g, or t
  misc_feature (219)..(219): n is a, c, g, or t
  misc_feature (224)..(224): n is a, c, g, or t
  misc_feature (228)..(229): n is a, c, g, or t
  misc_feature (233)..(233): n is a, c, g, or t
  misc_feature (243)..(243): n is a, c, g, or t
  misc_feature (246)..(250): n is a, c, g, or t
  misc_feature (254)..(254): n is a, c, g, or t
  misc_feature (256)..(256): n is a, c, g, or t
  misc_feature (268)..(268): n is a, c, g, or t
  misc_feature (270)..(270): n is a, c, g, or t
  misc_feature (274)..(274): n is a, c, g, or t
  misc_feature (283)..(283): n is a, c, g, or t
  misc_feature (293)..(293): n is a, c, g, or t
  misc_feature (297)..(297): n is a, c, g, or t
  misc_feature (299)..(300): n is a, c, g, or t
  misc_feature (309)..(309): n is a, c, g, or t
  misc_feature (311)..(312): n is a, c, g, or t
  misc_feature (325)..(327): n is a, c, g, or t
  misc_feature (330)..(330): n is a, c, g, or t
  misc_feature (342)..(342): n is a, c, g, or t
  misc_feature (349)..(349): n is a, c, g, or t
  misc_feature (353)..(354): n is a, c, g, or t
  misc_feature (361)..(363): n is a, c, g, or t
  misc_feature (366)..(368): n is a, c, g, or t
  misc_feature (376)..(376): n is a, c, g, or t
  misc_feature (381)..(382): n is a, c, g, or t
  misc_feature (397)..(397): n is a, c, g, or t
  misc_feature (401)..(401): n is a, c, g, or t
  misc_feature (403)..(403): n is a, c, g, or t
  misc_feature (406)..(406): n is a, c, g, or t
  misc_feature (410)..(410): n is a, c, g, or t
  misc_feature (414)..(414): n is a, c, g, or t
  misc_feature (421)..(421): n is a, c, g, or t
  misc_feature (424)..(424): n is a, c, g, or t
  misc_feature (426)..(426): n is a, c, g, or t
  misc_feature (428)..(428): n is a, c, g, or t
  misc_feature (435)..(436): n is a, c, g, or t
  misc_feature (438)..(438): n is a, c, g, or t
  misc_feature (440)..(440): n is a, c, g, or t
  misc_feature (442)..(443): n is a, c, g, or t
  misc_feature (445)..(445): n is a, c, g, or t
  misc_feature (447)..(448): n is a, c, g, or t
  misc_feature (451)..(451): n is a, c, g, or t
  misc_feature (453)..(454): n is a, c, g, or t
  misc_feature (458)..(458): n is a, c, g, or t
  misc_feature (467)..(467): n is a, c, g, or t
  misc_feature (473)..(473): n is a, c, g, or t
  misc_feature (476)..(476): n is a, c, g, or t
  misc_feature (479)..(479): n is a, c, g, or t
  misc_feature (483)..(483): n is a, c, g, or t
  misc_feature (487)..(488): n is a, c, g, or t
  misc_feature (492)..(492): n is a, c, g, or t
  misc_feature (496)..(498): n is a, c, g, or t
  misc_feature (503)..(503): n is a, c, g, or t
  misc_feature (505)..(508): n is a, c, g, or t
  misc_feature (511)..(512): n is a, c, g, or t
  misc_feature (515)..(515): n is a, c, g, or t
  misc_feature (517)..(517): n is a, c, g, or t
  misc_feature (521)..(521): n is a, c, g, or t
  misc_feature (524)..(525): n is a, c, g, or t
  misc_feature (528)..(529): n is a, c, g, or t
  misc_feature (531)..(531): n is a, c, g, or t
  misc_feature (534)..(534): n is a, c, g, or t
  misc_feature (539)..(539): n is a, c, g, or t
  misc_feature (544)..(544): n is a, c, g, or t
  misc_feature (546)..(546): n is a, c, g, or t
  misc_feature (550)..(550): n is a, c, g, or t
  misc_feature (557)..(557): n is a, c, g, or t
  misc_feature (572)..(572): n is a, c, g, or t
  misc_feature (574)..(574): n is a, c, g, or t
  misc_feature (580)..(580): n is a, c, g, or t
  misc_feature (588)..(589): n is a, c, g, or t
  misc_feature (592)..(593): n is a, c, g, or t
  misc_feature (611)..(611): n is a, c, g, or t
  misc_feature (613)..(614): n is a, c, g, or t
  misc_feature (616)..(616): n is a, c, g, or t
  misc_feature (620)..(620): n is a, c, g, or t
  misc_feature (623)..(623): n is a, c, g, or t
  misc_feature (627)..(627): n is a, c, g, or t
  misc_feature (629)..(629): n is a, c, g, or t
  misc_feature (632)..(633): n is a, c, g, or t
  misc_feature (636)..(641): n is a, c, g, or t
  misc_feature (643)..(643): n is a, c, g, or t
  misc_feature (648)..(648): n is a, c, g, or t
  misc_feature (651)..(654): n is a, c, g, or t
  misc_feature (658)..(658): n is a, c, g, or t
  misc_feature (661)..(661): n is a, c, g, or t
  misc_feature (664)..(664): n is a, c, g, or t
  misc_feature (669)..(670): n is a, c, g, or t
  misc_feature (675)..(675): n is a, c, g, or t
  misc_feature (677)..(677): n is a, c, g, or t
  misc_feature (679)..(679): n is a, c, g, or t
  misc_feature (681)..(681): n is a, c, g, or t
  misc_feature (686)..(690): n is a, c, g, or t
  misc_feature (695)..(695): n is a, c, g, or t
  misc_feature (697)..(697): n is a, c, g, or t
  misc_feature (700)..(702): n is a, c, g, or t
  misc_feature (704)..(705): n is a, c, g, or t
  misc_feature (710)..(710): n is a, c, g, or t
  misc_feature (718)..(718): n is a, c, g, or t
  misc_feature (720)..(720): n is a, c, g, or t
  misc_feature (722)..(724): n is a, c, g, or t
  misc_feature (730)..(731): n is a, c, g, or t
  misc_feature (736)..(738): n is a, c, g, or t
  misc_feature (740)..(740): n is a, c, g, or t
  misc_feature (744)..(744): n is a, c, g, or t
  misc_feature (748)..(748): n is a, c, g, or t
  misc_feature (752)..(752): n is a, c, g, or t
  misc_feature (754)..(754): n is a, c, g, or t
  misc_feature (758)..(762): n is a, c, g, or t
  misc_feature (764)..(764): n is a, c, g, or t
  misc_feature (766)..(766): n is a, c, g, or t
  misc_feature (771)..(771): n is a, c, g, or t
  misc_feature (774)..(774): n is a, c, g, or t
  misc_feature (776)..(776): n is a, c, g, or t
  misc_feature (782)..(782): n is a, c, g, or t
  misc_feature (785)..(785): n is a, c, g, or t
  misc_feature (788)..(789): n is a, c, g, or t
  misc_feature (792)..(792): n is a, c, g, or t
  misc_feature (794)..(796): n is a, c, g, or t
  misc_feature (799)..(799): n is a, c, g, or t
  misc_feature (802)..(803): n is a, c, g, or t
  misc_feature (807)..(808): n is a, c, g, or t
  misc_feature (810)..(811): n is a, c, g, or t
  misc_feature (813)..(814): n is a, c, g, or t
  misc_feature (817)..(817): n is a, c, g, or t
  misc_feature (819)..(820): n is a, c, g, or t
  misc_feature (832)..(832): n is a, c, g, or t
  misc_feature (834)..(834): n is a, c, g, or t
  misc_feature (838)..(839): n is a, c, g, or t
  misc_feature (844)..(845): n is a, c, g, or t
  misc_feature (847)..(847): n is a, c, g, or t
  misc_feature (849)..(849): n is a, c, g, or t
  misc_feature (852)..(857): n is a, c, g, or t
  misc_feature (859)..(859): n is a, c, g, or t
  misc_feature (864)..(865): n is a, c, g, or t
  misc_feature (868)..(868): n is a, c, g, or t
  misc_feature (872)..(872): n is a, c, g, or t
  misc_feature (875)..(875): n is a, c, g, or t
  misc_feature (878)..(878): n is a, c, g, or t
  misc_feature (880)..(880): n is a, c, g, or t
  misc_feature (882)..(882): n is a, c, g, or t
  misc_feature (885)..(885): n is a, c, g, or t
  misc_feature (889)..(889): n is a, c, g, or t
  misc_feature (891)..(891): n is a, c, g, or t
  misc_feature (893)..(893): n is a, c, g, or t
  misc_feature (898)..(898): n is a, c, g, or t
  misc_feature (904)..(904): n is a, c, g, or t
  misc_feature (909)..(910): n is a, c, g, or t
  misc_feature (917)..(920): n is a, c, g, or t
  misc_feature (925)..(925): n is a, c, g, or t
  misc_feature (928)..(928): n is a, c, g, or t
  misc_feature (933)..(933): n is a, c, g, or t
  misc_feature (936)..(936): n is a, c, g, or t
  misc_feature (940)..(941): n is a, c, g, or t
  misc_feature (947)..(947): n is a, c, g, or t
  misc_feature (950)..(952): n is a, c, g, or t
  misc_feature (954)..(954): n is a, c, g, or t
  misc_feature (957)..(957): n is a, c, g, or t
  misc_feature (963)..(965): n is a, c, g, or t
  misc_feature (967)..(968): n is a, c, g, or t
  misc_feature (976)..(977): n is a, c, g, or t
  misc_feature (980)..(980): n is a, c, g, or t
  misc_feature (984)..(987): n is a, c, g, or t
  misc_feature (989)..(989): n is a, c, g, or t
  misc_feature (994)..(994): n is a, c, g, or t
  misc_feature (998)..(999): n is a, c, g, or t
  misc_feature (1001)..(1001): n is a, c, g, or t
  misc_feature (1005)..(1005): n is a, c, g, or t
  misc_feature (1008)..(1008): n is a, c, g, or t
  misc_feature (1015)..(1016): n is a, c, g, or t
  misc_feature (1019)..(1019): n is a, c, g, or t
  misc_feature (1022)..(1022): n is a, c, g, or t
  misc_feature (1026)..(1027): n is a, c, g, or t
  misc_feature (1029)..(1029): n is a, c, g, or t
  misc_feature (1032)..(1034): n is a, c, g, or t
  misc_feature (1036)..(1036): n is a, c, g, or t
  misc_feature (1038)..(1038): n is a, c, g, or t
  misc_feature (1046)..(1046): n is a, c, g, or t
  misc_feature (1048)..(1048): n is a, c, g, or t
  misc_feature (1050)..(1050): n is a, c, g, or t
  misc_feature (1054)..(1057): n is a, c, g, or t
  misc_feature (1061)..(1061): n is a, c, g, or t
  misc_feature (1063)..(1063): n is a, c, g, or t
  misc_feature (1067)..(1067): n is a, c, g, or t
  misc_feature (1070)..(1075): n is a, c, g, or t
  misc_feature (1077)..(1077): n is a, c, g, or t
  misc_feature (1079)..(1079): n is a, c, g, or t
  misc_feature (1081)..(1082): n is a, c, g, or t
  misc_feature (1086)..(1086): n is a, c, g, or t
  misc_feature (1088)..(1095): n is a, c, g, or t
  misc_feature (1097)..(1097): n is a, c, g, or t
  misc_feature (1103)..(1104): n is a, c, g, or t
  misc_feature (1106)..(1106): n is a, c, g, or t
  misc_feature (1108)..(1108): n is a, c, g, or t
  misc_feature (1110)..(1112): n is a, c, g, or t
  misc_feature (1114)..(1114): n is a, c, g, or t
  misc_feature (1117)..(1117): n is a, c, g, or t
  misc_feature (1121)..(1121): n is a, c, g, or t
  misc_feature (1124)..(1124): n is a, c, g, or t
  misc_feature (1128)..(1128): n is a, c, g, or t
  misc_feature (1133)..(1134): n is a, c, g, or t
  misc_feature (1136)..(1137): n is a, c, g, or t
  misc_feature (1139)..(1139): n is a, c, g, or t
  misc_feature (1141)..(1142): n is a, c, g, or t
  misc_feature (1144)..(1144): n is a, c, g, or t
  misc_feature (1147)..(1148): n is a, c, g, or t
  misc_feature (1150)..(1151): n is a, c, g, or t
  misc_feature (1153)..(1154): n is a, c, g, or t
  misc_feature (1162)..(1163): n is a, c, g, or t
  misc_feature (1179)..(1179): n is a, c, g, or t
  misc_feature (1181)..(1182): n is a, c, g, or t
  misc_feature (1186)..(1186): n is a, c, g, or t
  misc_feature (1190)..(1191): n is a, c, g, or t
  misc_feature (1194)..(1195): n is a, c, g, or t
  misc_feature (1198)..(1199): n is a, c, g, or t
  misc_feature (1204)..(1204): n is a, c, g, or t
  misc_feature (1208)..(1209): n is a, c, g, or t
  misc_feature (1212)..(1212): n is a, c, g, or t
  misc_feature (1215)..(1215): n is a, c, g, or t
  misc_feature (1219)..(1219): n is a, c, g, or t
  misc_feature (1221)..(1223): n is a, c, g, or t
  misc_feature (1231)..(1231): n is a, c, g, or t
  misc_feature (1233)..(1233): n is a, c, g, or t
  misc_feature (1237)..(1237): n is a, c, g, or t
  misc_feature (1239)..(1240): n is a, c, g, or t
  misc_feature (1242)..(1242): n is a, c, g, or t
  misc_feature (1246)..(1247): n is a, c, g, or t
  misc_feature (1264)..(1264): n is a, c, g, or t
  misc_feature (1266)..(1267): n is a, c, g, or t
  misc_feature (1269)..(1269): n is a, c, g, or t
  misc_feature (1273)..(1274): n is a, c, g, or t
  misc_feature (1277)..(1277): n is a, c, g, or t
  misc_feature (1285)..(1286): n is a, c, g, or t
  misc_feature (1289)..(1289): n is a, c, g, or t
  misc_feature (1294)..(1294): n is a, c, g, or t
  misc_feature (1301)..(1301): n is a, c, g, or t
  misc_feature (1312)..(1312): n is a, c, g, or t
  misc_feature (1317)..(1317): n is a, c, g, or t
  misc_feature (1321)..(1321): n is a, c, g, or t
  misc_feature (1323)..(1323): n is a, c, g, or t
  misc_feature (1328)..(1329): n is a, c, g, or t
  misc_feature (1331)..(1331): n is a, c, g, or t
  misc_feature (1335)..(1335): n is a, c, g, or t
  misc_feature (1337)..(1338): n is a, c, g, or t
  misc_feature (1340)..(1340): n is a, c, g, or t
  misc_feature (1348)..(1349): n is a, c, g, or t
  misc_feature (1352)..(1352): n is a, c, g, or t
  misc_feature (1356)..(1357): n is a, c, g, or t
  misc_feature (1359)..(1359): n is a, c, g, or t
  misc_feature (1364)..(1367): n is a, c, g, or t
  misc_feature (1380)..(1380): n is a, c, g, or t
  misc_feature (1389)..(1389): n is a, c, g, or t
  misc_feature (1391)..(1393): n is a, c, g, or t
  misc_feature (1395)..(1396): n is a, c, g, or t
  misc_feature (1404)..(1404): n is a, c, g, or t
  misc_feature (1406)..(1406): n is a, c, g, or t
  misc_feature (1408)..(1408): n is a, c, g, or t
  misc_feature (1413)..(1413): n is a, c, g, or t
  misc_feature (1417)..(1418): n is a, c, g, or t
  misc_feature (1424)..(1425): n is a, c, g, or t
  misc_feature (1430)..(1430): n is a, c, g, or t
  misc_feature (1432)..(1432): n is a, c, g, or t
  misc_feature (1437)..(1437): n is a, c, g, or t
  misc_feature (1439)..(1440): n is a, c, g, or t
  misc_feature (1442)..(1442): n is a, c, g, or t
  misc_feature (1450)..(1451): n is a, c, g, or t
  misc_feature (1461)..(1461): n is a, c, g, or t
  misc_feature (1465)..(1465): n is a, c, g, or t
  misc_feature (1468)..(1468): n is a, c, g, or t
  misc_feature (1474)..(1474): n is a, c, g, or t
  misc_feature (1482)..(1482): n is a, c, g, or t
  misc_feature (1484)..(1484): n is a, c, g, or t
  misc_feature (1488)..(1489): n is a, c, g, or t
  misc_feature (1492)..(1493): n is a, c, g, or t
  misc_feature (1495)..(1495): n is a, c, g, or t
  misc_feature (1497)..(1497): n is a, c, g, or t
  misc_feature (1499)..(1499): n is a, c, g, or t
  misc_feature (1505)..(1505): n is a, c, g, or t
  misc_feature (1507)..(1507): n is a, c, g, or t
  misc_feature (1518)..(1518): n is a, c, g, or t
  misc_feature (1527)..(1527): n is a, c, g, or t
  misc_feature (1533)..(1533): n is a, c, g, or t
  misc_feature (1539)..(1540): n is a, c, g, or t
  misc_feature (1542)..(1542): n is a, c, g, or t
  misc_feature (1544)..(1544): n is a, c, g, or t
  misc_feature (1546)..(1546): n is a, c, g, or t
  misc_feature (1550)..(1550): n is a, c, g, or t
  misc_feature (1553)..(1553): n is a, c, g, or t
  misc_feature (1561)..(1562): n is a, c, g, or t
  misc_feature (1566)..(1566): n is a, c, g, or t
  misc_feature (1570)..(1570): n is a, c, g, or t
  misc_feature (1573)..(1574): n is a, c, g, or t
  misc_feature (1578)..(1578): n is a, c, g, or t
  misc_feature (1581)..(1581): n is a, c, g, or t
  misc_feature (1583)..(1584): n is a, c, g, or t
cngantagngagattactatgagaggatcgcatcccactcnccantcanggatcctntttaggtgacnctatagaatngtcgacccacgcgatccggncgcgnggnnnggcggagcgggtcncggcanccaccgnggcntagctcnggctncttcnngtccngancatgnggagggcggcccaggnggctcgngantcggagaggnggcccaagcgggnaccgnaganngagngcgagggggngcnnnnnccgnancggtgtttccgngntgcnactgttgangtcagtccgnccancnngactctgcncnngagcccggccacnnnagnatccaaaactgngagtcgngagnntttgacnnngtnnnatgagtcngcaannatgtctcctgccccnaagngnaancccnaggncactgcntanantnaacgtgnncngntnngncnngancnnctgngtctcaatngttggntanccnacgngttnnaaanctcnnncccancnnnncanntantntatnttnnttnncntantttangtacncnaccnacccccntcgtatatccaccanantttgantaatttannaanngaaactattagctcctcntnngntaanatncccntngtnntcnnnnnnancttcntgnnnntttnttntcnctatnnaattntntntncaaannnnncaaancntannnannagttngacatgcncnannnctgtcnnttccnnntntccnctanatantntcannnnngnancaacnatntntcttcnaanggnnttnannnatntannatcnncnntnnctncnnccctataaatcnanaatnnaaatnntncnacnnnnnnanatacnnacnttcnatnccnantnatncccncncncaatntcatanaaacnntaataannnnaattntcnaatcncanaccnnaacacntcnnnantanttttcnnnannccaaacannttntccnnnntntcttnttanntncgcnttncatctcnnatntancctnntncannntntntaataatncntntaannnnatcntnactnttnnnnnntntnanntcanannnnnnnncntcctcnncntncnnnantcnatangancacngactnntnncntnncntcnntnncnncctcctannatacattaatttatantnncctnattnntcnntanncatcngtcnnctnctntcantnnntaaaactnantttncnntnctcnnacaagacacttccagtnanntntctnntcntaccgcannctnttttntctcatntatatgtatcnccttngtancncattnnantttntnntnttatatannatnttcnntnttacnnnnatcatttcttatnctctatctntnnntnntcttcacntncntcatncccnnttctanntcgcnantattncnnantccataanncctctccctntctnaanataatnctatatantntaanntcnnantntnccaccncnatttcctcctncattcatantccctntatccnntnantncctnatncccaactnntctntctnatnncctnctngnn

SEQ ID NO: 395 - DNA, 256 bp, Homo Sapiens
  misc_feature (2)..(2): n is a, c, g, or t
  misc_feature (6)..(6): n is a, c, g, or t
  misc_feature (10)..(10): n is a, c, g, or t
  misc_feature (17)..(17): n is a, c, g, or t
  misc_feature (19)..(19): n is a, c, g, or t
  misc_feature (22)..(22): n is a, c, g, or t
  misc_feature (28)..(28): n is a, c, g, or t
  misc_feature (31)..(32): n is a, c, g, or t
  misc_feature (35)..(35): n is a, c, g, or t
  misc_feature (42)..(48): n is a, c, g, or t
  misc_feature (50)..(51): n is a, c, g, or t
  misc_feature (53)..(55): n is a, c, g, or t
  misc_feature (61)..(61): n is a, c, g, or t
  misc_feature (63)..(63): n is a, c, g, or t
  misc_feature (67)..(69): n is a, c, g, or t
  misc_feature (71)..(71): n is a, c, g, or t
  misc_feature (78)..(79): n is a, c, g, or t
  misc_feature (82)..(84): n is a, c, g, or t
  misc_feature (88)..(88): n is a, c, g, or t
  misc_feature (91)..(91): n is a, c, g, or t
  misc_feature (94)..(94): n is a, c, g, or t
  misc_feature (108)..(108): n is a, c, g, or t
  misc_feature (118)..(119): n is a, c, g, or t
  misc_feature (123)..(123): n is a, c, g, or t
  misc_feature (131)..(132): n is a, c, g, or t
  misc_feature (134)..(134): n is a, c, g, or t
  misc_feature (137)..(137): n is a, c, g, or t
  misc_feature (147)..(148): n is a, c, g, or t
  misc_feature (151)..(153): n is a, c, g, or t
  misc_feature (157)..(157): n is a, c, g, or t
  misc_feature (159)..(159): n is a, c, g, or t
  misc_feature (162)..(162): n is a, c, g, or t
  misc_feature (167)..(167): n is a, c, g, or t
  misc_feature (171)..(172): n is a, c, g, or t
  misc_feature (177)..(177): n is a, c, g, or t
  misc_feature (179)..(179): n is a, c, g, or t
  misc_feature (181)..(181): n is a, c, g, or t
  misc_feature (183)..(183): n is a, c, g, or t
  misc_feature (189)..(189): n is a, c, g, or t
  misc_feature (191)..(192): n is a, c, g, or t
  misc_feature (195)..(195): n is a, c, g, or t
  misc_feature (200)..(202): n is a, c, g, or t
  misc_feature (209)..(209): n is a, c, g, or t
  misc_feature (215)..(215): n is a, c, g, or t
  misc_feature (222)..(223): n is a, c, g, or t
  misc_feature (230)..(230): n is a, c, g, or t
  misc_feature (233)..(234): n is a, c, g, or t
  misc_feature (242)..(242): n is a, c, g, or t
  misc_feature (252)..(252): n is a, c, g, or t
  misc_feature (256)..(256): n is a, c, g, or t
gnctantggngccgctncnccncccccnccnnccnggaaagnnnnnnncnncnnnctggcncngccnnntncgcgccnncgnnnccantcnccntcaccatgctgaantttttttgannctcnccctttanncntcnccgcacgctnnctnnnaggncncgncgggnccgnncgggnangncngccgancnnagncgggnnncccgggncccccnccccccnncgccctnctnnaaatatgnaaaataatcntatn

SEQ ID NO: 396 - DNA, 256 bp, Homo Sapiens
gcaggcgccctgggctttttgggcgcgaaaaagaagcagtcctgggttgtacccggcgcagctgggagcggctgcttcctccggggtcgtatctccgcccggcatggggctgctggacctttgcgaggaagtgttcggcaccgccgacctttaccgggtgctgggcgtgcgacgcgaggcctccgacggcgaggtccgacgaggctaccacaaggtgtccctgcaggtacacccggaccgggtgggtgagggcgac

SEQ ID NO: 397 - DNA, 1393 bp, Homo Sapiens
  misc_feature (930)..(930): n is a, c, g, or t
  misc_feature (939)..(939): n is a, c, g, or t
  misc_feature (991)..(991): n is a, c, g, or t
  misc_feature (998)..(998): n is a, c, g, or t
  misc_feature (1002)..(1002): n is a, c, g, or t
  misc_feature (1026)..(1026): n is a, c, g, or t
  misc_feature (1038)..(1038): n is a, c, g, or t
  misc_feature (1041)..(1041): n is a, c, g, or t
  misc_feature (1047)..(1047): n is a, c, g, or t
  misc_feature (1054)..(1054): n is a, c, g, or t
  misc_feature (1067)..(1067): n is a, c, g, or t
  misc_feature (1070)..(1070): n is a, c, g, or t
  misc_feature (1075)..(1075): n is a, c, g, or t
  misc_feature (1077)..(1077): n is a, c, g, or t
  misc_feature (1080)..(1080): n is a, c, g, or t
  misc_feature (1094)..(1094): n is a, c, g, or t
  misc_feature (1104)..(1104): n is a, c, g, or t
  misc_feature (1108)..(1109): n is a, c, g, or t
  misc_feature (1114)..(1114): n is a, c, g, or t
  misc_feature (1123)..(1124): n is a, c, g, or t
  misc_feature (1144)..(1144): n is a, c, g, or t
  misc_feature (1155)..(1156): n is a, c, g, or t
  misc_feature (1168)..(1169): n is a, c, g, or t
  misc_feature (1172)..(1172): n is a, c, g, or t
  misc_feature (1175)..(1175): n is a, c, g, or t
  misc_feature (1177)..(1177): n is a, c, g, or t
  misc_feature (1181)..(1181): n is a, c, g, or t
  misc_feature (1183)..(1183): n is a, c, g, or t
  misc_feature (1186)..(1186): n is a, c, g, or t
  misc_feature (1193)..(1193): n is a, c, g, or t
  misc_feature (1198)..(1198): n is a, c, g, or t
  misc_feature (1201)..(1202): n is a, c, g, or t
  misc_feature (1206)..(1206): n is a, c, g, or t
  misc_feature (1210)..(1210): n is a, c, g, or t
  misc_feature (1214)..(1214): n is a, c, g, or t
  misc_feature (1221)..(1221): n is a, c, g, or t
  misc_feature (1223)..(1223): n is a, c, g, or t
  misc_feature (1230)..(1230): n is a, c, g, or t
  misc_feature (1235)..(1235): n is a, c, g, or t
  misc_feature (1238)..(1238): n is a, c, g, or t
  misc_feature (1243)..(1243): n is a, c, g, or t
  misc_feature (1245)..(1245): n is a, c, g, or t
  misc_feature (1252)..(1253): n is a, c, g, or t
  misc_feature (1261)..(1262): n is a, c, g, or t
  misc_feature (1266)..(1266): n is a, c, g, or t
  misc_feature (1268)..(1270): n is a, c, g, or t
  misc_feature (1275)..(1276): n is a, c, g, or t
  misc_feature (1279)..(1279): n is a, c, g, or t
  misc_feature (1281)..(1282): n is a, c, g, or t
  misc_feature (1284)..(1284): n is a, c, g, or t
  misc_feature (1288)..(1290): n is a, c, g, or t
  misc_feature (1292)..(1292): n is a, c, g, or t
  misc_feature (1299)..(1303): n is a, c, g, or t
  misc_feature (1308)..(1309): n is a, c, g, or t
  misc_feature (1312)..(1312): n is a, c, g, or t
  misc_feature (1314)..(1314): n is a, c, g, or t
  misc_feature (1317)..(1317): n is a, c, g, or t
  misc_feature (1323)..(1326): n is a, c, g, or t
  misc_feature (1332)..(1332): n is a, c, g, or t
  misc_feature (1335)..(1336): n is a, c, g, or t
  misc_feature (1339)..(1342): n is a, c, g, or t
  misc_feature (1344)..(1345): n is a, c, g, or t
  misc_feature (1348)..(1348): n is a, c, g, or t
  misc_feature (1354)..(1354): n is a, c, g, or t
  misc_feature (1356)..(1356): n is a, c, g, or t
  misc_feature (1358)..(1358): n is a, c, g, or t
  misc_feature (1360)..(1363): n is a, c, g, or t
  misc_feature (1365)..(1366): n is a, c, g, or t
  misc_feature (1368)..(1368): n is a, c, g, or t
  misc_feature (1372)..(1377): n is a, c, g, or t
  misc_feature (1380)..(1383): n is a, c, g, or t
  misc_feature (1390)..(1390): n is a, c, g, or t
  misc_feature (1393)..(1393): n is a, c, g, or t
caatagagagattactatgagaggatcgcatcaccatcaccatcacggatcctatttaggtgacactatagaatcgtcgacccacgcgtccgcagagctctccagagttcaagggctccctggcctccctctcagacagcttgggggtgtctgtcatggccaccgaccaggactcctactccaccagcagcacggaggaggagctggagcagttcagcagccccagcgtgaagaagaagccctccatgatcctgggcaaggctcggcaccggctgagctttgccagtttcagcagcatgttccacgctttcctctccaacaaccgcaagctgtacaagaaggtggtggagctggcgcaggacaagggctcgtactttggcagcctggtgcaggactacaaggtgtacagcctggagatgatggcgcgccagacctccagcacggagatgctgcaggagattcgcaccatgatgacccagctcaagagctacctgctgcagagcaccgagctcaaggccctggtggaccccgccctgcactccgaggaggagctcgaagcaattgtagagtctgccttgtacaaatgtgtcctgaagcccctgaaggaagccatcaactcatgcctgcatcagatccacagcaaggatggttcgctgcagcagctcaaggagaaccagttagtgatcctggccaccaccaccactgacctaggtgtgaccaccagcgtgccggaggtgcccatgatggagaagatcctgcagaagttcaccagcatgcacaaggcctactcacctgagaagaagatctccatcctgctcaagacctgcaaactcatctacgactccatggccctcggcaacccagggaagccctatgggggcggatgacttcctgcctgtgctcatgtatgtgctggccccgcaaccaacntcacggaanatgcttctcaatgtggagtacatgatggagctcatggaaccccgccctgcanctggggnaggnttctaatatctgaccaccacctangggggcctggancanatcaanaactacnaaaaaatcccggnganccgcnanttnaatggggaagtgcngattcctccnccgnnggganggccggggnnttttcaaaaaggccgggccnccccctccccnnaaagaatttttnnggntcnanctgnanccnaaaaaanggggnaanntggntccngggngaaaccnanccaaggntttgnccnatggngnaaaattnnggggaaanncccncnnnagggnnatnanntnatannnantggaccnnnnnaaaannaananccnaaaccnnnntttttnaannccnnnncnnggntttttngnancnnnntnngntttnnnnnnaannnnaaaaatnttn

SEQ ID NO: 398 - DNA, 256 bp, Homo Sapiens
taagagaaattaactatgagaggatcgcatcaccatcaccatcacggatcctatttaggtgacactatagaatcgtcgacccacgcgtccggggagctctactgcctggaacacggcatccagcccgatggccagatgccaagtgacaagaccattgggggaggagatgactccttcaacaccttcttcagtgagacgggcgctggcaagcacgtgccccgggctgtgtttgtagacttggaacccacagtcattg

SEQ ID NO: 399 - DNA, 1319 bp, Homo Sapiens
  misc_feature (851)..(851): n is a, c, g, or t
  misc_feature (857)..(857): n is a, c, g, or t
  misc_feature (953)..(953): n is a, c, g, or t
  misc_feature (956)..(956): n is a, c, g, or t
  misc_feature (965)..(965): n is a, c, g, or t
  misc_feature (970)..(970): n is a, c, g, or t
  misc_feature (992)..(992): n is a, c, g, or t
  misc_feature (1002)..(1002): n is a, c, g, or t
  misc_feature (1013)..(1013): n is a, c, g, or t
  misc_feature (1016)..(1016): n is a, c, g, or t
  misc_feature (1022)..(1022): n is a, c, g, or t
  misc_feature (1032)..(1033): n is a, c, g, or t
  misc_feature (1045)..(1045): n is a, c, g, or t
  misc_feature (1048)..(1048): n is a, c, g, or t
  misc_feature (1059)..(1059): n is a, c, g, or t
  misc_feature (1064)..(1064): n is a, c, g, or t
  misc_feature (1073)..(1074): n is a, c, g, or t
  misc_feature (1085)..(1085): n is a, c, g, or t
  misc_feature (1090)..(1090): n is a, c, g, or t
  misc_feature (1110)..(1122): n is a, c, g, or t
  misc_feature (1140)..(1140): n is a, c, g, or t
  misc_feature (1143)..(1143): n is a, c, g, or t
  misc_feature (1159)..(1159): n is a, c, g, or t
  misc_feature (1171)..(1171): n is a, c, g, or t
  misc_feature (1175)..(1175): n is a, c, g, or t
  misc_feature (1181)..(1182): n is a, c, g, or t
  misc_feature (1191)..(1191): n is a, c, g, or t
  misc_feature (1193)..(1193): n is a, c, g, or t
  misc_feature (1196)..(1197): n is a, c, g, or t
  misc_feature (1206)..(1206): n is a, c, g, or t
  misc_feature (1209)..(1209): n is a, c, g, or t
  misc_feature (1219)..(1219): n is a, c, g, or t
  misc_feature (1229)..(1230): n is a, c, g, or t
  misc_feature (1238)..(1238): n is a, c, g, or t
  misc_feature (1241)..(1241): n is a, c, g, or t
  misc_feature (1243)..(1243): n is a, c, g, or t
  misc_feature (1251)..(1251): n is a, c, g, or t
  misc_feature (1253)..(1253): n is a, c, g, or t
  misc_feature (1258)..(1258): n is a, c, g, or t
  misc_feature (1268)..(1268): n is a, c, g, or t
  misc_feature (1274)..(1274): n is a, c, g, or t
  misc_feature (1283)..(1283): n is a, c, g, or t
  misc_feature (1285)..(1286): n is a, c, g, or t
  misc_feature (1290)..(1290): n is a, c, g, or t
  misc_feature (1296)..(1296): n is a, c, g, or t
  misc_feature (1299)..(1300): n is a, c, g, or t
  misc_feature (1303)..(1303): n is a, c, g, or t
  misc_feature (1308)..(1308): n is a, c, g, or t
  misc_feature (1310)..(1310): n is a, c, g, or t
  misc_feature (1313)..(1313): n is a, c, g, or t
  misc_feature (1319)..(1319): n is a, c, g, or t
aatagagaaattactatgagaggatcgcatcaccatcaccatcacggatcctatttaggtgacactatagaatcgtcgacccacgcgtccgatttaaggtggtgctttttttttttgtccttaaaacttgatttttcttaactttattcatgatgccaaagtaaatgaggaaaaaaactcaaaaccagttgagtatcattgcagacaaaactaccagtagtccatattgtttaatattaagttgaataaaataaattttatttcagtcagagcctaaatcacattttgattgtctgaatttttgatactatttttaaaatcatgctagtggcggctgggcgtggtggctcacgcctgtaatcccagcattttgggaggccgaagtgggtggatcacgaggtcgggagttcgagaccagcttggccaaaatggtgaaaccccatctgtactaaaaactacaaaaattggctgggcgcggtggcaggtgcctgtaatcccagctacctgggagtctgaggcaggagaattgcttgaaccctggcgacagaggatgcagtgagccaagatggtgccactgtactccagactgggcgacagagtgagactctgtctcaaaaaaaaaaaaaaaaatcatgctagtgccaagagctactaaattcttaaaaccggcccattggacctgtacagataaaaaatagattcagtgcataatcaaaatatgataattttaaaatcttaagtagaaaaataaatcttgatgttttaaattcttacgaggattcaatagttaatattgatgatctcccggctgggtgcagtggctcacgcctgtaatcccagcagttctggangctgangtgggcgaatcacttcaggccaggagttcaagaccagtctgggcaacatggggaaaacctcgtttctactaaaaatacaaaaattagcccgggcgnggntggcccacncctgntaatcccagctactcaggaagnctaaaaatcncatgaacctangangcaaangttgcaaaanngccaagggctcnccnctgcattccancctgnccaaaaaanngggaaccctgntttcngaaaaaaaaaaaaatttttnnnnnnnnnnnnnggggggggaaaaaaaaanggnaaaaaaaaaaggaccnccaataaaaacntttntccccnnccgggggcngnggnncccccccgntanccccaagggngggggaatanngggggggnccncncccccggncntgggncccggttttnaaaggnatttttttngnnaccncccctnaannggnaaaananggncccccn

SEQ ID NO: 400 - DNA, 1349 bp, Homo Sapiens; identical to SEQ ID NO: 73
  misc_feature (1)..(1): n is a, c, g, or t
  misc_feature (804)..(804): n is a, c, g, or t
  misc_feature (899)..(899): n is a, c, g, or t
  misc_feature (906)..(906): n is a, c, g, or t
  misc_feature (918)..(918): n is a, c, g, or t
  misc_feature (923)..(923): n is a, c, g, or t
  misc_feature (927)..(927): n is a, c, g, or t
  misc_feature (935)..(935): n is a, c, g, or t
  misc_feature (937)..(938): n is a, c, g, or t
  misc_feature (946)..(946): n is a, c, g, or t
  misc_feature (950)..(950): n is a, c, g, or t
  misc_feature (960)..(960): n is a, c, g, or t
  misc_feature (965)..(965): n is a, c, g, or t
  misc_feature (972)..(973): n is a, c, g, or t
  misc_feature (976)..(976): n is a, c, g, or t
  misc_feature (999)..(999): n is a, c, g, or t
  misc_feature (1002)..(1002): n is a, c, g, or t
  misc_feature (1007)..(1007): n is a, c, g, or t
  misc_feature (1009)..(1009): n is a, c, g, or t
  misc_feature (1013)..(1014): n is a, c, g, or t
  misc_feature (1016)..(1016): n is a, c, g, or t
  misc_feature (1024)..(1024): n is a, c, g, or t
  misc_feature (1026)..(1026): n is a, c, g, or t
  misc_feature (1028)..(1028): n is a, c, g, or t
  misc_feature (1031)..(1031): n is a, c, g, or t
  misc_feature (1038)..(1038): n is a, c, g, or t
  misc_feature (1047)..(1047): n is a, c, g, or t
  misc_feature (1050)..(1050): n is a, c, g, or t
  misc_feature (1059)..(1059): n is a, c, g, or t
  misc_feature (1062)..(1062): n is a, c, g, or t
  misc_feature (1064)..(1064): n is a, c, g, or t
  misc_feature (1066)..(1068): n is a, c, g, or t
  misc_feature (1081)..(1081): n is a, c, g, or t
  misc_feature (1083)..(1085): n is a, c, g, or t
  misc_feature (1108)..(1109): n is a, c, g, or t
  misc_feature (1119)..(1120): n is a, c, g, or t
  misc_feature (1122)..(1123): n is a, c, g, or t
  misc_feature (1127)..(1127): n is a, c, g, or t
  misc_feature (1131)..(1133): n is a, c, g, or t
  misc_feature (1139)..(1139): n is a, c, g, or t
  misc_feature (1151)..(1151): n is a, c, g, or t
  misc_feature (1157)..(1157): n is a, c, g, or t
  misc_feature (1160)..(1160): n is a, c, g, or t
  misc_feature (1169)..(1169): n is a, c, g, or t
  misc_feature (1171)..(1171): n is a, c, g, or t
  misc_feature (1175)..(1175): n is a, c, g, or t
  misc_feature (1178)..(1178): n is a, c, g, or t
  misc_feature (1182)..(1184): n is a, c, g, or t
  misc_feature (1186)..(1193): n is a, c, g, or t
  misc_feature (1196)..(1197): n is a, c, g, or t
  misc_feature (1199)..(1200): n is a, c, g, or t
  misc_feature (1203)..(1204): n is a, c, g, or t
  misc_feature (1206)..(1207): n is a, c, g, or t
  misc_feature (1212)..(1213): n is a, c, g, or t
  misc_feature (1225)..(1226): n is a, c, g, or t
  misc_feature (1228)..(1228): n is a, c, g, or t
  misc_feature (1234)..(1234): n is a, c, g, or t
  misc_feature (1237)..(1238): n is a, c, g, or t
  misc_feature (1242)..(1242): n is a, c, g, or t
  misc_feature (1244)..(1245): n is a, c, g, or t
  misc_feature (1247)..(1247): n is a, c, g, or t
  misc_feature (1249)..(1250): n is a, c, g, or t
  misc_feature (1254)..(1269): n is a, c, g, or t
  misc_feature (1274)..(1277): n is a, c, g, or t
  misc_feature (1279)..(1282): n is a, c, g, or t
  misc_feature (1289)..(1294): n is a, c, g, or t
  misc_feature (1302)..(1303): n is a, c, g, or t
  misc_feature (1305)..(1306): n is a, c, g, or t
  misc_feature (1310)..(1311): n is a, c, g, or t
  misc_feature (1313)..(1321): n is a, c, g, or t
  misc_feature (1326)..(1331): n is a, c, g, or t
  misc_feature (1334)..(1336): n is a, c, g, or t
  misc_feature (1338)..(1349): n is a, c, g, or t

SEQ ID NO: 401 - DNA, 1168 bp, Homo Sapiens
gttctttaaggagggagaattaactatgagaggatcgcatcaccatcaccatcacggatcctatttaggtgacactatagaatcgtcgacccacgcgtccgcccacgcgtccgcggacgcgtgggcccttgccaaagaccagttggccatcgcggcctcccgacacggtcgcacgtatcatgcgtacccagactttgccccccaaaagttcaaagagaaaacacagggtcaggttaaaatcttggaagacagctttttgaaaagttcttttcctacccaagcaaaactggatcggctaagggtggagaccaagctgagcaggatagagatcgactcctggttctcggagaggcggaagcttcgagacagcatggaacaagctgtcttggattccatggggtctggcaaaaaaggccaagatgtgggagcccccaatggtgctctgtctcgactcgaccagctttccggtgcccagttaacaagttctctgcccagcccttcgccagcaattgcaaaaagtcaagaacaggttcatctcctgaggagcacgtttgcaaaaacccagtggcctactccccaggagtacgaccagttagcggccaagactggcctggtccgaactgagattgtgcgttggttcaaggagaacagatgcttgctgaaaacgggaaccgtgaagtggatggagcagtaccagcaccagcccatggcagatgatcacggctacgatgccgtagcaaggaaagcaacaaaacccatggccgagagcccaaagaacgggggtgatgtggttccacaatattacaaggaccccaaaaagctctgcgaagaggacttggagaagttggtgaccagggtaaaagtaggcagcgagccagcaaagactgtttgccagcaaagccctcagaggccatctcagactggtcagagggcatcatccgggacggtcagggtagcgacgaagacgaggagtcgagcgttgtggattacgtggaggtgatggtcggggaggaggatgccatctcagatagatcagatagctggagtcaggctgcggcagagtgtgtcggactggctgattagactccgactgcgtcctgcgagctggcagcttaacagggagtctgtaaactgctgtggctgatcacgggacgcttcggtcttggag

SEQ ID NO: 402 - DNA, 1289 bp, Homo Sapiens
  misc_feature (128)..(128): n is a, c, g, or t
  misc_feature (911)..(911): n is a, c, g, or t
  misc_feature (954)..(954): n is a, c, g, or t
  misc_feature (978)..(978): n is a, c, g, or t
  misc_feature (983)..(983): n is a, c, g, or t
  misc_feature (989)..(989): n is a, c, g, or t
  misc_feature (1035)..(1035): n is a, c, g, or t
  misc_feature (1051)..(1051): n is a, c, g, or t
  misc_feature (1063)..(1063): n is a, c, g, or t
  misc_feature (1071)..(1071): n is a, c, g, or t
  misc_feature (1106)..(1106): n is a, c, g, or t
  misc_feature (1114)..(1114): n is a, c, g, or t
  misc_feature (1126)..(1126): n is a, c, g, or t
  misc_feature (1135)..(1135): n is a, c, g, or t
  misc_feature (1145)..(1145): n is a, c, g, or t
  misc_feature (1149)..(1149): n is a, c, g, or t
  misc_feature (1169)..(1169): n is a, c, g, or t
  misc_feature (1177)..(1177): n is a, c, g, or t
  misc_feature (1179)..(1179): n is a, c, g, or t
  misc_feature (1184)..(1184): n is a, c, g, or t
  misc_feature (1191)..(1191): n is a, c, g, or t
  misc_feature (1206)..(1206): n is a, c, g, or t
  misc_feature (1210)..(1210): n is a, c, g, or t
  misc_feature (1214)..(1214): n is a, c, g, or t
  misc_feature (1216)..(1216): n is a, c, g, or t
  misc_feature (1221)..(1221): n is a, c, g, or t
  misc_feature (1234)..(1234): n is a, c, g, or t
  misc_feature (1237)..(1237): n is a, c, g, or t
  misc_feature (1250)..(1250): n is a, c, g, or t
  misc_feature (1266)..(1266): n is a, c, g, or t
  misc_feature (1268)..(1268): n is a, c, g, or t
  misc_feature (1270)..(1270): n is a, c, g, or t
  misc_feature (1277)..(1278): n is a, c, g, or t
  misc_feature (1285)..(1285): n is a, c, g, or t
  misc_feature (1288)..(1289): n is a, c, g, or t
tagagaaattactatgagaggatcgcatcaccatcaccatcacggatcctatttaggtgacactatagaatcgtcgacccacgcgtccgcacagagctcagtgcaaccaccagaaggagacagtgaancaaaagctcctgaagaatcatcagaggatgtgacaaaatatcaggaaggagtatctgcagaaaacccagttgagaaccatatcaatataacacaatcagataagttcacagccaagccattggattccaactcaggagaaagaaatgacctcaatcttgatcgctcttgtggggttccagaagaatctgcttcatctgaaaaagccaaggaaccagaaacttcagatcagactagcactgagagtgctaccaatgaaaataacaccaatcctgagcctcagttccaaacagaagccactgggccttcagctcatgaagaaacatccaccagggactctgctcttcaggacacagatgacagtgatgatgacccagtcctgatcccaggtgcaaggtatcgagcaggacctggtgatagacgctctgctgttgcccgtattcaggagttcttcagacggagaaaagaaaggaaagaaatggaagaattggatactttgaacattagaaggccgctagtaaaaatggtttataaaggccatcgcaactccaggacaatgataaaagaagccaatttctggggtgctaactttgtaatgagtggttctgactgtggccacattttcatctgggatcggcacactgctgagcatttgatgcttctggaagctgataatcatgtggtaaactgcctgcagccacatccgtttgacccaattttagcctcatctggcatagattatgacataaagatctggtcaccattagaagagtcaaggatttttnaaccgaaaacttgctgatgaagttataactcgaaacgaactcntgctggaagaaactagaaacaccnttacngttccngcctctttcatgttgaggatgttggcttcccttaatcatatccganctgacggttggagggngacaaatcaaangctctggncacaaaatggaaatgaggatgaggataataactcntttggcancccttaatgtcngaatttgtnaaaaactttnttantttttttcttacaaactttnggcatttnanggtanggtttgnaattttccctttttngganaccnanattgnttggaaaatgggngcnaaatttgggaatnttaaaacaaactcccnangnttttaannttttgcnggnn

SEQ ID NO: 403 - DNA, 1275 bp, Homo Sapiens
  misc_feature (859)..(859): n is a, c, g, or t
  misc_feature (861)..(861): n is a, c, g, or t
  misc_feature (863)..(863): n is a, c, g, or t
  misc_feature (869)..(869): n is a, c, g, or t
  misc_feature (871)..(871): n is a, c, g, or t
  misc_feature (873)..(873): n is a, c, g, or t
  misc_feature (875)..(875): n is a, c, g, or t
  misc_feature (877)..(877): n is a, c, g, or t
  misc_feature (890)..(890): n is a, c, g, or t
  misc_feature (899)..(899): n is a, c, g, or t
  misc_feature (925)..(925): n is a, c, g, or t
  misc_feature (927)..(927): n is a, c, g, or t
  misc_feature (930)..(930): n is a, c, g, or t
  misc_feature (996)..(996): n is a, c, g, or t
  misc_feature (1016)..(1016): n is a, c, g, or t
  misc_feature (1047)..(1047): n is a, c, g, or t
  misc_feature (1065)..(1066): n is a, c, g, or t
  misc_feature (1071)..(1071): n is a, c, g, or t
  misc_feature (1075)..(1075): n is a, c, g, or t
  misc_feature (1084)..(1085): n is a, c, g, or t
  misc_feature (1090)..(1091): n is a, c, g, or t
  misc_feature (1105)..(1105): n is a, c, g, or t
  misc_feature (1110)..(1110): n is a, c, g, or t
  misc_feature (1116)..(1116): n is a, c, g, or t
  misc_feature (1144)..(1144): n is a, c, g, or t
  misc_feature (1146)..(1146): n is a, c, g, or t
  misc_feature (1169)..(1169): n is a, c, g, or t
  misc_feature (1172)..(1172): n is a, c, g, or t
  misc_feature (1178)..(1178): n is a, c, g, or t
  misc_feature (1194)..(1195): n is a, c, g, or t
  misc_feature (1200)..(1201): n is a, c, g, or t
  misc_feature (1213)..(1214): n is a, c, g, or t
  misc_feature (1234)..(1234): n is a, c, g, or t
  misc_feature (1236)..(1236): n is a, c, g, or t
  misc_feature (1247)..(1247): n is a, c, g, or t
  misc_feature (1268)..(1269): n is a, c, g, or t
  misc_feature (1271)..(1271): n is a, c, g, or t
  misc_feature (1273)..(1274): n is a, c, g, or t
agaaattactatgagaggatcgcatcaccatcaccatcacggatcctatttaggtgacactatagaatcgtcgacccacgcgtccgccatccgggatgctaacctgtacgtcagcgggctccccaagaccatgagccagaaagagatggagcagctcttctcccagtacggccgcatcatcacgtcccgcatcctggtggaccaggtcacaggtgtctctcggggtgtgggattcatccgctttgacaagaggattgaggccgaagaggctatcaaaggactgaatgggcagaagccgctgggcgcagctgagcccatcacagtcaagttcgcgaacaacccaagtcagaagacggggcaggcgctgctcacccacctctaccagtcatccgcccggcgctacgcaggccccctacaccatcagacccagcgtttccggctggacaatttgctcaacatggcctacggcgtcaagaggttctcgccgatcgccatcgatggtatgagcggcctggcgggcgtgggcctgtcggggggcgcggcgggcgccggctggtgcatcttcgtgtacaacctgtcaccggaggcagacgagagcgtgctgtggcagctgttcgggccttttggggcagtcaccaacgtcaaggtcatccgtgatttcaccaccaacaagtgcaagggtttcggcttcgtgaccatgaccaactatgacgaggcggccatggccatcgccagcctgaacggctatcgcctgggcgagcgcgtgctgcaggtctccttcaagaccagcaaacagcacaaggcgtgagcccaccccgcctgccctcccaccccctccccgggcagcagagagagaganananaaaganananananagagagaaggggncccaaaaanagacagcacaggcagcccccacggancnacncgagggcccccacgtccctgcggaaacccaaggggtgagcactctgggggtgggaaggttctgcanggaaatttgggggggggtgncccggggaatcccccggcccccattctttcntgcccccaaccccaaggnntgggnctgnttcaactcnnccccnnccttgggtttgggnttcangggggnaaagtttttttgttttcttttttttcgncnaaaaaaaaaatgccaaaaaattnttncccccnaccccccaaacctttnnaaaanncccccaaagggnnatggcttttgggggggcctncnagggggggggnccctcccaaaaccccctttgnncnanng

SEQ ID NO: 404 - DNA, 1403 bp, Homo Sapiens
  misc_feature (828)..(828): n is a, c, g, or t
  misc_feature (851)..(851): n is a, c, g, or t
  misc_feature (853)..(853): n is a, c, g, or t
  misc_feature (877)..(877): n is a, c, g, or t
  misc_feature (901)..(901): n is a, c, g, or t
  misc_feature (927)..(927): n is a, c, g, or t
  misc_feature (939)..(940): n is a, c, g, or t
  misc_feature (965)..(965): n is a, c, g, or t
  misc_feature (969)..(969): n is a, c, g, or t
  misc_feature (985)..(985): n is a, c, g, or t
  misc_feature (987)..(987): n is a, c, g, or t
  misc_feature (1000)..(1000): n is a, c, g, or t
  misc_feature (1010)..(1011): n is a, c, g, or t
  misc_feature (1017)..(1017): n is a, c, g, or t
  misc_feature (1021)..(1021): n is a, c, g, or t
  misc_feature (1023)..(1024): n is a, c, g, or t
  misc_feature (1032)..(1032): n is a, c, g, or t
  misc_feature (1052)..(1052): n is a, c, g, or t
  misc_feature (1067)..(1068): n is a, c, g, or t
  misc_feature (1071)..(1072): n is a, c, g, or t
  misc_feature (1082)..(1082): n is a, c, g, or t
  misc_feature (1091)..(1091): n is a, c, g, or t
  misc_feature (1096)..(1096): n is a, c, g, or t
  misc_feature (1100)..(1100): n is a, c, g, or t
  misc_feature (1103)..(1103): n is a, c, g, or t
  misc_feature (1116)..(1116): n is a, c, g, or t
  misc_feature (1121)..(1121): n is a, c, g, or t
  misc_feature (1124)..(1124): n is a, c, g, or t
  misc_feature (1133)..(1133): n is a, c, g, or t
  misc_feature (1137)..(1137): n is a, c, g, or t
  misc_feature (1153)..(1153): n is a, c, g, or t
  misc_feature (1155)..(1155): n is a, c, g, or t
  misc_feature (1159)..(1159): n is a, c, g, or t
  misc_feature (1163)..(1163): n is a, c, g, or t
  misc_feature (1177)..(1177): n is a, c, g, or t
  misc_feature (1181)..(1182): n is a, c, g, or t
  misc_feature (1186)..(1186): n is a, c, g, or t
  misc_feature (1199)..(1199): n is a, c, g, or t
  misc_feature (1218)..(1218): n is a, c, g, or t
  misc_feature (1221)..(1221): n is a, c, g, or t
  misc_feature (1244)..(1244): n is a, c, g, or t
  misc_feature (1257)..(1258): n is a, c, g, or t
  misc_feature (1267)..(1267): n is a, c, g, or t
  misc_feature (1271)..(1271): n is a, c, g, or t
  misc_feature (1273)..(1273): n is a, c, g, or t
  misc_feature (1275)..(1275): n is a, c, g, or t
  misc_feature (1279)..(1282): n is a, c, g, or t
  misc_feature (1289)..(1289): n is a, c, g, or t
  misc_feature (1299)..(1299): n is a, c, g, or t
  misc_feature (1301)..(1301): n is a, c, g, or t
  misc_feature (1303)..(1306): n is a, c, g, or t
  misc_feature (1309)..(1309): n is a, c, g, or t
  misc_feature (1313)..(1314): n is a, c, g, or t
  misc_feature (1321)..(1321): n is a, c, g, or t
  misc_feature (1323)..(1323): n is a, c, g, or t
  misc_feature (1329)..(1329): n is a, c, g, or t
  misc_feature (1332)..(1332): n is a, c, g, or t
  misc_feature (1334)..(1336): n is a, c, g, or t
  misc_feature (1338)..(1338): n is a, c, g, or t
  misc_feature (1343)..(1343): n is a, c, g, or t
  misc_feature (1347)..(1348): n is a, c, g, or t
  misc_feature (1350)..(1351): n is a, c, g, or t
  misc_feature (1355)..(1355): n is a, c, g, or t
  misc_feature (1361)..(1361): n is a, c, g, or t
  misc_feature (1371)..(1371): n is a, c, g, or t
  misc_feature (1374)..(1374): n is a, c, g, or t
  misc_feature (1384)..(1386): n is a, c, g, or t
  misc_feature (1393)..(1393): n is a, c, g, or t
  misc_feature (1395)..(1395): n is a, c, g, or t
  misc_feature (1401)..(1401): n is a, c, g, or t
gaatagagagaattactatgagaggatcgcatcaccatcaccatcacgggatcctatttaggtgacactatagaatcgtcgacccacgcgtccgcccagtctcaaagtggtgaaggaggcagtgttgactacagttatctgcaaccaggtcaagatggctatgcccaatatgctcagtattcacaggattatcagcagttttatcaacaacaagctggaggattggaatctgatgcatcatctgcatcaggcacagcagtgaccaccacctcagcggctgtagtgtcccagagtcctcagctgtataatcaaacctccaatccacctggctctccgactgaggaagcacagcctagcactagcacaagtacacaggccccagccgcttcccctactggtgtagttcctggtaccaaatatgcagtacctgacacgtccacttaccagtatgatgaatcttcaggatattactatgatccgacaacagggctctattatgaccccaactcgcaatactactataattccttgacccagcagtacctttactgggatggggaaaaagagacctacgtgccagctgcagagtctagctcccaccagcagtcgggcctgcctcctgcaaaagaggggaaagagaagaaggagaaacccaagagcaaaacagcccagcagattgccaaagacatggaacgctgggctaagagtttgaataagcagaaagaaaactttaaaaatagctttcagcctgtcaattccttgaggggaagaagaaaggagagaatctgctgcagcagacgctggcttttgctctctttgagaaagaanggagccttagctgaaaggcagcnanctcatcccagaattggtgcgaaanggaagatgaagaagaatcccctcnaaaaggggtctgggttgcctgcttanaatggtgaacannggacaaagaagaagaactggtgganaaanttgaaattgagggaananaacctaacctgantggaaaaaanngggctngttngnnctgccggncccattttccgaaaaaaaangccctaattcagggnncannaaattttcanaactttccnaagcnaaanatnggaacttttatcngccantcnaggctgaancgancagggactgggaaccntngganctangggaaaaaaaaaanaaanncccngaacccgaactgncaaaaaaaggaaaaaaaanggntttcaaaaccccaaagccaaacncaaaaaaatttgnngcccggccntgtnantnacannnncccccanaaaggtgttncncnnnnaanttgnncaaaaantncccccncangnnngnggganacanntnntggnaaaagnccggctttcnccncccttggccnnnccctatngnggtgcnaa

SEQ ID NO: 405 - DNA, 1435 bp, Homo Sapiens
  misc_feature (833)..(833): n is a, c, g, or t
  misc_feature (909)..(909): n is a, c, g, or t
  misc_feature (924)..(924): n is a, c, g, or t
  misc_feature (928)..(928): n is a, c, g, or t
  misc_feature (984)..(984): n is a, c, g, or t
  misc_feature (989)..(989): n is a, c, g, or t
  misc_feature (992)..(992): n is a, c, g, or t
  misc_feature (999)..(999): n is a, c, g, or t
  misc_feature (1024)..(1025): n is a, c, g, or t
  misc_feature (1042)..(1042): n is a, c, g, or t
  misc_feature (1049)..(1049): n is a, c, g, or t
  misc_feature (1065)..(1065): n is a, c, g, or t
  misc_feature (1072)..(1072): n is a, c, g, or t
  misc_feature (1077)..(1077): n is a, c, g, or t
  misc_feature (1079)..(1079): n is a, c, g, or t
  misc_feature (1082)..(1082): n is a, c, g, or t
  misc_feature (1085)..(1085): n is a, c, g, or t
  misc_feature (1089)..(1089): n is a, c, g, or t
  misc_feature (1097)..(1097): n is a, c, g, or t
  misc_feature (1105)..(1106): n is a, c, g, or t
  misc_feature (1113)..(1114): n is a, c, g, or t
  misc_feature (1118)..(1118): n is a, c, g, or t
  misc_feature (1130)..(1130): n is a, c, g, or t
  misc_feature (1133)..(1133): n is a, c, g, or t
  misc_feature (1137)..(1137): n is a, c, g, or t
  misc_feature (1139)..(1139): n is a, c, g, or t
  misc_feature (1141)..(1141): n is a, c, g, or t
  misc_feature (1147)..(1147): n is a, c, g, or t
  misc_feature (1169)..(1170): n is a, c, g, or t
  misc_feature (1174)..(1174): n is a, c, g, or t
  misc_feature (1179)..(1180): n is a, c, g, or t
  misc_feature (1182)..(1182): n is a, c, g, or t
  misc_feature (1186)..(1186): n is a, c, g, or t
  misc_feature (1190)..(1190): n is a, c, g, or t
  misc_feature (1192)..(1192): n is a, c, g, or t
  misc_feature (1204)..(1204): n is a, c, g, or t
  misc_feature (1206)..(1206): n is a, c, g, or t
  misc_feature (1210)..(1210): n is a, c, g, or t
  misc_feature (1214)..(1214): n is a, c, g, or t
  misc_feature (1219)..(1219): n is a, c, g, or t
  misc_feature (1234)..(1234): n is a, c, g, or t
  misc_feature (1242)..(1242): n is a, c, g, or t
  misc_feature (1259)..(1260): n is a, c, g, or t
  misc_feature (1264)..(1266): n is a, c, g, or t
  misc_feature (1268)..(1268): n is a, c, g, or t
  misc_feature (1274)..(1275): n is a, c, g, or t
  misc_feature (1282)..(1282): n is a, c, g, or t
  misc_feature (1284)..(1284): n is a, c, g, or t
  misc_feature (1293)..(1294): n is a, c, g, or t
  misc_feature (1306)..(1306): n is a, c, g, or t
  misc_feature (1311)..(1311): n is a, c, g, or t
  misc_feature (1313)..(1313): n is a, c, g, or t
  misc_feature (1321)..(1321): n is a, c, g, or t
  misc_feature (1330)..(1330): n is a, c, g, or t
  misc_feature (1332)..(1332): n is a, c, g, or t
  misc_feature (1337)..(1337): n is a, c, g, or t
  misc_feature (1343)..(1343): n is a, c, g, or t
  misc_feature (1346)..(1347): n is a, c, g, or t
  misc_feature (1359)..(1360): n is a, c, g, or t
  misc_feature (1364)..(1364): n is a, c, g, or t
  misc_feature (1373)..(1373): n is a, c, g, or t
  misc_feature (1380)..(1380): n is a, c, g, or t
  misc_feature (1382)..(1383): n is a, c, g, or t
  misc_feature (1405)..(1407): n is a, c, g, or t
  misc_feature (1411)..(1411): n is a, c, g, or t
  misc_feature (1422)..(1422): n is a, c, g, or t
  misc_feature (1424)..(1425): n is a, c, g, or t
  misc_feature (1428)..(1428): n is a, c, g, or t
  misc_feature (1430)..(1430): n is a, c, g, or t
  misc_feature (1435)..(1435): n is a, c, g, or t
tagagaaattactatgagaggatcgcatcaccatcaccatcacggatcctatttaggtgacactatagaatcgtcgacccacgcgtccggcacaacaaaaagcaaggaactttctccaggctctgcacagaaaggaagtccaggctccagccagggcacagcctgtgcagggactcaaccaggggctcaacctggagctcagccgggcgccagccccagccccagccagccgcctgcagaccagagtcctcacaccctccggaaagtttcaaagaagctggcaccgattccacccaaggtcccctttggccagccgggggctatggcagaccagtccgctggccagccgtccccagtcagcctgtcccccaccccgcccagcaccccgtcaccctatggactgagctaccctcaggggtactccttggcctcgggccagctctccccagctgcagctcctcccctggcctctccttctgtctttacaagcactttgagcaaatcgcggcccactcctaagccgcgacagagacctactctgccgcctcctcagcctcccacagtaaacctctcggcctctagtccacagtccacggaggcccccatgctagatggcatgtcccctggggaaagcatgtctacagatcttgtccactttgatattccctcgatccacatagagctcgggtcgacgctccgcctgagtcccctggagcacatgcggcgacactcagtaactgacaagagggactcggaggaggagtctgagagcaccgccctctgacatgacaccgcccatcctgcctcgcgtgtacatacatcacgggccctangaacgccgccaggagcagcgtccatgagcttgccaagtgttctctgctggctctttcctgccactgccaacacgangttggaatttggcanaaantgtgatctccagtccgtgtggtgatgctggtggtgcaggttttgtttgttcctttnggggnggngacttcngccttttgtttgacctttgcctttnnactttgggcctcttttngatccantttcagcctccatgcnaaaaaanacccncnttntcnttcnaaggttgntaaggaanntcttttnnaggntcggggtggtgnggnaaangntncctttncttggttaaaaccaaggggttnntacnttttnntngganggtntngttaggtttggngnatantttnatggnccaaaaaaaaaaagnaaaaaggncctttccccaaatgganngttnnnanttaaannctggggnanaattttcannattggggagggntgccngnaaaatttnggccccccntngggtncaaaanggnnaaaaaatttttnnaaanttttttttnggggggncnntttttttttttttaaaaaaaannngtgngggaaaggttntnnttntntaaan

SEQ ID NO: 406 - DNA, 1210 bp, Homo Sapiens
cttccttaagagggagaattaactatgagaggatcgcatcaccatcaccatcacggatcctatttaggtgacactatagaatcgtcgacccacgcgtccgatctgaacagcgacattgttacagcccccgctttcgctctcctgcttgaattcatgtatgaagggaaactccagttcaaagacttgcccattgaagacgtgctagcagctgccagttatctccacatgtatgacattgtcaaagtctgcaaaaagaagctgaaagagaaagccaccacggaggcagacagcaccaaaaaggaagaagatgcttcaagttgttcggacaaagtcgagagtctctccgatggcagcagccacatagcaggcgatttgcccagtgatgaagatgaaggagaagatgaaaaattgaacatcctgcccagcaaaagggacttggcggccgagcctgggaacatgtggatgcgattgccctcagactcagcaggcatcccccaggctggcggagaggcagagccacacgccacagcagctggaaaaacagtagccagcccctgcagctcaacagagtctttgtcccagaggtctgtcacctccgtgagggattcggcagatgttgactgtgtgctggacctgtctgtcaagtccagcctttcaggagttgaaaatctgaacagctcttatttctcttcacaggacgtgctgagaaaaaaaaaaaaaaaaaaaaaaagggcggccgctccctatagtgagtcgtattaagcttaattagctgagcttggactcctgttgatagatccagtaatgacctcagaactccatctggatttgttcagaacgctcggttgccgccgggcgttttttattggtgagaatccaagctagcttggcgagattttcaggagctaagaagctaaatggagaaaaaatcacttggatttaccaccgttgatatatcccaatggcatcgtaaagaacattttgaggcatttcagtcagttgctcatgtacctataaccagaccgttcagctggattttacggtctttttaagaccgtaaagaaattaggcacagttttattcggctttattccacattctttgctcgcttgatgatgtctcattcgatttcgtatgcattgagacggtggactgtgtaatgctttggttcaccttgtttaaccgttttcaggagacaaactggatcgtt

SEQ ID NO: 407 - DNA, 1386 bp, Homo Sapiens
  misc_feature (884)..(884): n is a, c, g, or t
  misc_feature (891)..(891): n is a, c, g, or t
  misc_feature (908)..(908): n is a, c, g, or t
  misc_feature (920)..(920): n is a, c, g, or t
  misc_feature (953)..(953): n is a, c, g, or t
  misc_feature (957)..(957): n is a, c, g, or t
  misc_feature (960)..(960): n is a, c, g, or t
  misc_feature (963)..(963): n is a, c, g, or t
  misc_feature (996)..(996): n is a, c, g, or t
  misc_feature (998)..(998): n is a, c, g, or t
  misc_feature (1001)..(1001): n is a, c, g, or t
  misc_feature (1006)..(1006): n is a, c, g, or t
  misc_feature (1010)..(1010): n is a, c, g, or t
  misc_feature (1014)..(1015): n is a, c, g, or t
  misc_feature (1020)..(1020): n is a, c, g, or t
  misc_feature (1027)..(1027): n is a, c, g, or t
  misc_feature (1031)..(1031): n is a, c, g, or t
  misc_feature (1034)..(1034): n is a, c, g, or t
  misc_feature (1037)..(1037): n is a, c, g, or t
  misc_feature (1040)..(1040): n is a, c, g, or t
  misc_feature (1046)..(1046): n is a, c, g, or t
  misc_feature (1050)..(1050): n is a, c, g, or t
  misc_feature (1052)..(1052): n is a, c, g, or t
  misc_feature (1061)..(1062): n is a, c, g, or t
  misc_feature (1069)..(1069): n is a, c, g, or t
  misc_feature (1077)..(1077): n is a, c, g, or t
  misc_feature (1080)..(1080): n is a, c, g, or t
  misc_feature (1084)..(1085): n is a, c, g, or t
  misc_feature (1090)..(1090): n is a, c, g, or t
  misc_feature (1093)..(1093): n is a, c, g, or t
  misc_feature (1101)..(1101): n is a, c, g, or t
  misc_feature (1103)..(1103): n is a, c, g, or t
  misc_feature (1108)..(1108): n is a, c, g, or t
  misc_feature (1111)..(1111): n is a, c, g, or t
  misc_feature (1115)..(1115): n is a, c, g, or t
  misc_feature (1119)..(1119): n is a, c, g, or t
  misc_feature (1122)..(1122): n is a, c, g, or t
  misc_feature (1124)..(1126): n is a, c, g, or t
  misc_feature (1128)..(1128): n is a, c, g, or t
  misc_feature (1132)..(1132): n is a, c, g, or t
  misc_feature (1134)..(1134): n is a, c, g, or t
  misc_feature (1138)..(1138): n is a, c, g, or t
  misc_feature (1148)..(1148): n is a, c, g, or t
  misc_feature (1153)..(1153): n is a, c, g, or t
  misc_feature (1162)..(1162): n is a, c, g, or t
  misc_feature (1168)..(1168): n is a, c, g, or t
  misc_feature (1170)..(1171): n is a, c, g, or t
  misc_feature (1173)..(1175): n is a, c, g, or t
  misc_feature (1177)..(1178): n is a, c, g, or t
  misc_feature (1180)..(1182): n is a, c, g, or t
  misc_feature (1184)..(1184): n is a, c, g, or t
  misc_feature (1188)..(1188): n is a, c, g, or t
  misc_feature (1198)..(1203): n is a, c, g, or t
  misc_feature (1206)..(1206): n is a, c, g, or t
  misc_feature (1210)..(1211): n is a, c, g, or t
  misc_feature (1213)..(1215): n is a, c, g, or t
  misc_feature (1219)..(1219): n is a, c, g, or t
  misc_feature (1238)..(1240): n is a, c, g, or t
  misc_feature (1247)..(1248): n is a, c, g, or t
  misc_feature (1250)..(1251): n is a, c, g, or t
  misc_feature (1258)..(1258): n is a, c, g, or t
  misc_feature (1260)..(1260): n is a, c, g, or t
  misc_feature (1266)..(1266): n is a, c, g, or t
  misc_feature (1272)..(1272): n is a, c, g, or t
  misc_feature (1276)..(1276): n is a, c, g, or t
  misc_feature (1279)..(1279): n is a, c, g, or t
  misc_feature (1284)..(1284): n is a, c, g, or t
  misc_feature (1286)..(1287): n is a, c, g, or t
  misc_feature (1292)..(1292): n is a, c, g, or t
  misc_feature (1294)..(1294): n is a, c, g, or t
  misc_feature (1296)..(1297): n is a, c, g, or t
  misc_feature (1299)..(1300): n is a, c, g, or t
  misc_feature (1305)..(1305): n is a, c, g, or t
  misc_feature (1326)..(1326): n is a, c, g, or t
  misc_feature (1328)..(1328): n is a, c, g, or t
  misc_feature (1336)..(1336): n is a, c, g, or t
  misc_feature (1338)..(1340): n is a, c, g, or t
  misc_feature (1342)..(1342): n is a, c, g, or t
  misc_feature (1344)..(1346): n is a, c, g, or t
  misc_feature (1348)..(1349): n is a, c, g, or t
  misc_feature (1351)..(1352): n is a, c, g, or t
  misc_feature (1373)..(1373): n is a, c, g, or t
  misc_feature (1375)..(1376): n is a, c, g, or t
  misc_feature (1379)..(1379): n is a, c, g, or t
  misc_feature (1381)..(1382): n is a, c, g, or t
  misc_feature (1384)..(1385): n is a, c, g, or t
atagagagattactatgagaggatcgcatcaccatcaccatcacggatcctatttaggtgacactatagaatcgtcgacccacgcgtccggcgccaagttcaaaatcagctcggacttgaaaaggcacatgcgggtgcactcgggggagaagcctttcaagtgcgagttctgcaatgtccgctgcaccatgaaggggaacctcaagtcgcacatccgtatcaagcacagcgggaataacttcaagtgtcctcattgcgacttcctgggtgacagcaaagccaccctccggaagcacagccgcgtgcaccagtcggagcatcctgagaagtgctcggaatgcagctactcctgctccagcaaggccgccctgcgcatccacgagcgtatccactgcaccgaccgccctttcaagtgcaactactgcagcttcgacaccaaacagcccagcaacctgagcaagcacatgaagaagttccatggggacatggttaagactgaggctctagagaggaaggacaccggcaggcagagcagccggcaggtggccaagctggatgccaagaagagtttccactgcgatatatgcgatgcctccttcatgcgggaggactcgctccgcagccacaagagacagcacagtgagtacagtgagagtaagaactcggacgtgaccgttctccagtttcagatcgaccccagcaagcagcccgccacgcccctcactgtgggacacctccaggtgcccctccagcccagccaagtgccccagttcagcgagggaagagtcaaaatcatcgttgggcatcaggtgccccaggcgaacaccatcgtccaggctgccgccgctgcagtgaacatcgtcccgcctgccttggtggcccanaacccanaggaactcccagggaanagccggctgcanatcctgcgccaggtcagtctgatcgcccccccntcantcntcncggtgtccgaacgagggcggcgcaatgacccancnggntgtcntgtnaacnnccacnaacaaangganganccnctntgcacnaaantntcatccccnnggcctcnggggcccnaanaagnnctggnatnaaattttntnacaanttngggnatanttncnnnantttnangccnaaaccctttntttcnggagggaanccaaantnnannngnnannnangagnccaaaaattnnnnnnggncccnnannncccnggtttttccctcttttccnnnaaaaatnncnnaaacttncntttttngggggncccnccnttttntnnccccnancnntnnaaagnttaaaaaaggggggggaaagntnaaaaaaantnnnantnnnanntnnttttttttttttttttaaaancnnttncnngnng

SEQ ID NO: 408 - DNA, 1406 bp, Homo Sapiens; identical to SEQ ID NO: 171
  misc_feature (398)..(398): n is a, c, g, or t
  misc_feature (732)..(732): n is a, c, g, or t
  misc_feature (810)..(810): n is a, c, g, or t
  misc_feature (878)..(878): n is a, c, g, or t
  misc_feature (899)..(899): n is a, c, g, or t
  misc_feature (939)..(939): n is a, c, g, or t
  misc_feature (941)..(941): n is a, c, g, or t
  misc_feature (956)..(956): n is a, c, g, or t
  misc_feature (959)..(959): n is a, c, g, or t
  misc_feature (965)..(965): n is a, c, g, or t
  misc_feature (974)..(974): n is a, c, g, or t
  misc_feature (996)..(996): n is a, c, g, or t
  misc_feature (1014)..(1015): n is a, c, g, or t
  misc_feature (1018)..(1018): n is a, c, g, or t
  misc_feature (1022)..(1022): n is a, c, g, or t
  misc_feature (1029)..(1029): n is a, c, g, or t
  misc_feature (1049)..(1049): n is a, c, g, or t
  misc_feature (1061)..(1061): n is a, c, g, or t
  misc_feature (1065)..(1065): n is a, c, g, or t
  misc_feature (1067)..(1068): n is a, c, g, or t
  misc_feature (1082)..(1082): n is a, c, g, or t
  misc_feature (1088)..(1088): n is a, c, g, or t
  misc_feature (1094)..(1094): n is a, c, g, or t
  misc_feature (1098)..(1098): n is a, c, g, or t
  misc_feature (1100)..(1101): n is a, c, g, or t
  misc_feature (1107)..(1108): n is a, c, g, or t
  misc_feature (1119)..(1119): n is a, c, g, or t
  misc_feature (1121)..(1121): n is a, c, g, or t
  misc_feature (1142)..(1143): n is a, c, g, or t
  misc_feature (1152)..(1152): n is a, c, g, or t
  misc_feature (1157)..(1157): n is a, c, g, or t
  misc_feature (1169)..(1170): n is a, c, g, or t
  misc_feature (1187)..(1187): n is a, c, g, or t
  misc_feature (1189)..(1190): n is a, c, g, or t
  misc_feature (1195)..(1195): n is a, c, g, or t
  misc_feature (1209)..(1209): n is a, c, g, or t
  misc_feature (1213)..(1213): n is a, c, g, or t
  misc_feature (1218)..(1218): n is a, c, g, or t
  misc_feature (1224)..(1225): n is a, c, g, or t
  misc_feature (1237)..(1237): n is a, c, g, or t
  misc_feature (1250)..(1252): n is a, c, g, or t
  misc_feature (1262)..(1263): n is a, c, g, or t
  misc_feature (1269)..(1269): n is a, c, g, or t
  misc_feature (1282)..(1282): n is a, c, g, or t
  misc_feature (1286)..(1286): n is a, c, g, or t
  misc_feature (1304)..(1305): n is a, c, g, or t
  misc_feature (1307)..(1308): n is a, c, g, or t
  misc_feature (1310)..(1310): n is a, c, g, or t
  misc_feature (1312)..(1312): n is a, c, g, or t
  misc_feature (1334)..(1334): n is a, c, g, or t
  misc_feature (1342)..(1344): n is a, c, g, or t
  misc_feature (1348)..(1351): n is a, c, g, or t
  misc_feature (1354)..(1354): n is a, c, g, or t
  misc_feature (1357)..(1357): n is a, c, g, or t
  misc_feature (1359)..(1359): n is a, c, g, or t
  misc_feature (1363)..(1363): n is a, c, g, or t
  misc_feature (1365)..(1365): n is a, c, g, or t
  misc_feature (1367)..(1368): n is a, c, g, or t
  misc_feature (1372)..(1373): n is a, c, g, or t
  misc_feature (1397)..(1397): n is a, c, g, or t
  misc_feature (1402)..(1402): n is a, c, g, or t

SEQ ID NO: 409 - DNA, 1191 bp, Homo Sapiens
taatccttaaggaagaagaattaactatgagaggtcgcatcaccatcaccatcacggatcctatttaggtgacactatagaatcgtcgacccacgcgtccgtgttgaatgaagaaaatccaagtaaggcctacaggtgcagttccaaggaagcctttgagaaagggctctgcttgagttgtagaaagaaccgctgcaacaatctgggctatgagatcaataaagtcagagccaaaagaagcagcaaaatgtacctgaagactcgttctcagatgccctacaaagtcttccattaccaagtaaagattcatttttctgggactgagagtgaaacccataccaatcaggcctttgagatttctctgtatggcaccgtggccgagagtgagaacatcccattcactctgcctgaagtttccacaaataagacctactccttcctaatttacacagaggtagatattggagaactactcatgttgaagctcaaatggaagagtgattcatactttagctggtcagactggtggagcagtcccggcttcgccattcagaagatcagagtaaaagcaggagagactcagaaaaaggtgatcttctgttctagggagaaagtgtctcatttgcagaaaggaaaggcacctgcggtatttgtgaaatgccatgacaagtctctgaataagaagtcaggctgaaactgggcgaatctacagaacaaagaacggcatgtgaattctgtgaagaatgaagtggaggaagtaacttttacaaaacatacccagtgtttggggtgtttcaaaagtggattttcctgaatattaatcccagccctacccttgttagttattttaggagacagtctcagcactaaaaagtggctaattcaatttatggggtatagtggccaaatagcacatcctccaacgttaaaagacagtggatcatgaaaagtgctgttttgtcctttgagaaagaaataatgtttgagcgcagagtaaatacgctccttcatgtgcgtattgggccatagcctataattggtagaacctcctatttaattggattctggatctttcggactgagcttctcaaacttactctagtcttccaggattcgaaatgctttcgcgacggatcagactcatctacacagcagatgaatgatgtttagaatgaattcctcttgctattt

SEQ ID NO: 410 - DNA, 1388 bp, Homo Sapiens
  misc_feature (877)..(877): n is a, c, g, or t
  misc_feature (902)..(902): n is a, c, g, or t
  misc_feature (926)..(926): n is a, c, g, or t
  misc_feature (931)..(931): n is a, c, g, or t
  misc_feature (939)..(939): n is a, c, g, or t
  misc_feature (949)..(949): n is a, c, g, or t
  misc_feature (955)..(955): n is a, c, g, or t
  misc_feature (968)..(968): n is a, c, g, or t
  misc_feature (995)..(995): n is a, c, g, or t
  misc_feature (1044)..(1044): n is a, c, g, or t
  misc_feature (1048)..(1048): n is a, c, g, or t
  misc_feature (1050)..(1050): n is a, c, g, or t
  misc_feature (1054)..(1054): n is a, c, g, or t
  misc_feature (1076)..(1076): n is a, c, g, or t
  misc_feature (1082)..(1082): n is a, c, g, or t
  misc_feature (1085)..(1085): n is a, c, g, or t
  misc_feature (1087)..(1087): n is a, c, g, or t
  misc_feature (1091)..(1091): n is a, c, g, or t
  misc_feature (1102)..(1103): n is a, c, g, or t
  misc_feature (1105)..(1106): n is a, c, g, or t
  misc_feature (1113)..(1113): n is a, c, g, or t
  misc_feature (1115)..(1115): n is a, c, g, or t
  misc_feature (1118)..(1118): n is a, c, g, or t
  misc_feature (1143)..(1143): n is a, c, g, or t
  misc_feature (1155)..(1155): n is a, c, g, or t
  misc_feature (1160)..(1160): n is a, c, g, or t
  misc_feature (1164)..(1166): n is a, c, g, or t
  misc_feature (1178)..(1178): n is a, c, g, or t
  misc_feature (1198)..(1199): n is a, c, g, or t
  misc_feature (1203)..(1203): n is a, c, g, or t
  misc_feature (1207)..(1208): n is a, c, g, or t
  misc_feature (1213)..(1214): n is a, c, g, or t
  misc_feature (1216)..(1216): n is a, c, g, or t
  misc_feature (1228)..(1228): n is a, c, g, or t
  misc_feature (1231)..(1232): n is a, c, g, or t
  misc_feature (1252)..(1252): n is a, c, g, or t
  misc_feature (1255)..(1255): n is a, c, g, or t
  misc_feature (1264)..(1264): n is a, c, g, or t
  misc_feature (1266)..(1266): n is a, c, g, or t
  misc_feature (1272)..(1274): n is a, c, g, or t
  misc_feature (1291)..(1291): n is a, c, g, or t
  misc_feature (1296)..(1296): n is a, c, g, or t
  misc_feature (1304)..(1304): n is a, c, g, or t
  misc_feature (1309)..(1309): n is a, c, g, or t
  misc_feature (1318)..(1318): n is a, c, g, or t
  misc_feature (1326)..(1327): n is a, c, g, or t
  misc_feature (1343)..(1343): n is a, c, g, or t
  misc_feature (1350)..(1351): n is a, c, g, or t
  misc_feature (1353)..(1353): n is a, c, g, or t
  misc_feature (1356)..(1356): n is a, c, g, or t
  misc_feature (1362)..(1363): n is a, c, g, or t
  misc_feature (1366)..(1369): n is a, c, g, or t
  misc_feature (1376)..(1376): n is a, c, g, or t
  misc_feature (1379)..(1379): n is a, c, g, or t
tagagagattactatgagaggatcgcatcaccatcaccatcacggatcctatttaggtgacactatagaatcgtcgacccacgcgtccgctagagggttaggataccaggccgagttcaggccactgctagctttctcatactcccacaggctagaccagagatgccaagtcccaacagcactgagctgtgtgcactgtgccagggacaggagggtttgtgaactgcctgtcagggtacctgttagcccctgacaactcagtggggtgaagttttggaggtcagagtctgctttcgtaggctctttagacagcacctaccacttggttctccagcgtagactcctgggagcagccaactgcagccattgccatccagtggggagatgggttagggaggaggacgggctgactcctctcctgtaataaagctgacaagagttctagaggattctgcttctctagtaactagacaggtgatacgcatttgcttgccacattaagggaaaatggtgtcatttgttgcagaaaaacaatggatacattttcttctggcctaaatgaatatttatgtgcaaacataggcaactgttaaaggctggaattttcaaaagatccaaacagagacttcctgcatcttctgcctttccaacagaagcggtgatcgtctaagtatgagcctgtggcttcctttgtgcatttgagcatgctgtaattaagatgagatcagtttcttagaaaaagctttcctgaatccctctgacgttgcctgggatctttctgttgattcgtcttttctggagattgggacagagcatctgtggtccagggaagttagtcctctggcctcaattctgtttgtggatgtgcagtgataancgggcattgcgtgcctcggggaagncctagttcgtggcttcctggctgntttgnccttccgnggccttgganctgganggtgccacctcangggaatggggtgttggcggcgtttccncggttggcccccttgctttgccccccccccaggttctggcatgaaaagnccgngncccntttctggggaaaacctttttanttaaanacntncttnattaaatcccnncnnttgaatncnaanttcttctgcaaaaaagtttgggggnaaaaaacccggnaatangaannnaaaaaatttgtnttttcctttaaccttgaccnnaccnaagnnttttnngnaaaacacccttnttnnaaaaaaaagaaagggccggncangggcccccngnaccccnnnttgggggccaggggggncccgngggggaanaaacnccccaaaanggaaaccnncctaaaaaaaaaaacnggggggnngnccncccccnnggnnnngggaaanttncccgggggg

SEQ ID NO: 411 - DNA, 1536 bp, Homo Sapiens
  misc_feature (37)..(37): n is a, c, g, or t
  misc_feature (39)..(39): n is a, c, g, or t
  misc_feature (46)..(46): n is a, c, g, or t
  misc_feature (97)..(97): n is a, c, g, or t
  misc_feature (112)..(112): n is a, c, g, or t
  misc_feature (115)..(115): n is a, c, g, or t
  misc_feature (243)..(243): n is a, c, g, or t
  misc_feature (384)..(384): n is a, c, g, or t
  misc_feature (475)..(475): n is a, c, g, or t
  misc_feature (508)..(508): n is a, c, g, or t
  misc_feature (515)..(515): n is a, c, g, or t
  misc_feature (522)..(522): n is a, c, g, or t
  misc_feature (530)..(530): n is a, c, g, or t
  misc_feature (541)..(541): n is a, c, g, or t
  misc_feature (546)..(546): n is a, c, g, or t
  misc_feature (552)..(552): n is a, c, g, or t
  misc_feature (557)..(558): n is a, c, g, or t
  misc_feature (576)..(577): n is a, c, g, or t
  misc_feature (579)..(580): n is a, c, g, or t
  misc_feature (586)..(586): n is a, c, g, or t
  misc_feature (591)..(591): n is a, c, g, or t
  misc_feature (595)..(595): n is a, c, g, or t
  misc_feature (597)..(598): n is a, c, g, or t
  misc_feature (602)..(602): n is a, c, g, or t
  misc_feature (607)..(607): n is a, c, g, or t
  misc_feature (618)..(618): n is a, c, g, or t
  misc_feature (621)..(622): n is a, c, g, or t
  misc_feature (628)..(629): n is a, c, g, or t
  misc_feature (631)..(631): n is a, c, g, or t
  misc_feature (639)..(639): n is a, c, g, or t
  misc_feature (641)..(642): n is a, c, g, or t
  misc_feature (648)..(650): n is a, c, g, or t
  misc_feature (662)..(663): n is a, c, g, or t
  misc_feature (666)..(666): n is a, c, g, or t
  misc_feature (669)..(669): n is a, c, g, or t
  misc_feature (684)..(684): n is a, c, g, or t
  misc_feature (686)..(686): n is a, c, g, or t
  misc_feature (694)..(695): n is a, c, g, or t
  misc_feature (698)..(699): n is a, c, g, or t
  misc_feature (709)..(709): n is a, c, g, or t
  misc_feature (711)..(713): n is a, c, g, or t
  misc_feature (717)..(719): n is a, c, g, or t
  misc_feature (725)..(731): n is a, c, g, or t
  misc_feature (741)..(741): n is a, c, g, or t
  misc_feature (743)..(744): n is a, c, g, or t
  misc_feature (747)..(748): n is a, c, g, or t
  misc_feature (750)..(752): n is a, c, g, or t
  misc_feature (754)..(754): n is a, c, g, or t
  misc_feature (759)..(759): n is a, c, g, or t
  misc_feature (762)..(762): n is a, c, g, or t
  misc_feature (766)..(766): n is a, c, g, or t
  misc_feature (768)..(768): n is a, c, g, or t
  misc_feature (772)..(772): n is a, c, g, or t
  misc_feature (775)..(777): n is a, c, g, or t
  misc_feature (784)..(784): n is a, c, g, or t
  misc_feature (787)..(787): n is a, c, g, or t
  misc_feature (792)..(792): n is a, c, g, or t
  misc_feature (795)..(795): n is a, c, g, or t
  misc_feature (800)..(800): n is a, c, g, or t
  misc_feature (804)..(805): n is a, c, g, or t
  misc_feature (811)..(811): n is a, c, g, or t
  misc_feature (813)..(813): n is a, c, g, or t
  misc_feature (815)..(815): n is a, c, g, or t
  misc_feature (822)..(825): n is a, c, g, or t
  misc_feature (828)..(828): n is a, c, g, or t
  misc_feature (830)..(831): n is a, c, g, or t
  misc_feature (835)..(835): n is a, c, g, or t
  misc_feature (838)..(839): n is a, c, g, or t
  misc_feature (845)..(845): n is a, c, g, or t
  misc_feature (848)..(850): n is a, c, g, or t
  misc_feature (856)..(856): n is a, c, g, or t
  misc_feature (859)..(860): n is a, c, g, or t
  misc_feature (865)..(866): n is a, c, g, or t
  misc_feature (869)..(869): n is a, c, g, or t
  misc_feature (873)..(873): n is a, c, g, or t
  misc_feature (875)..(876): n is a, c, g, or t
  misc_feature (880)..(881): n is a, c, g, or t
  misc_feature (888)..(888): n is a, c, g, or t
  misc_feature (891)..(891): n is a, c, g, or t
  misc_feature (893)..(896): n is a, c, g, or t
  misc_feature (899)..(899): n is a, c, g, or t
  misc_feature (905)..(905): n is a, c, g, or t
  misc_feature (907)..(907): n is a, c, g, or t
  misc_feature (909)..(909): n is a, c, g, or t
  misc_feature (912)..(912): n is a, c, g, or t
  misc_feature (914)..(915): n is a, c, g, or t
  misc_feature (919)..(919): n is a, c, g, or t
  misc_feature (922)..(922): n is a, c, g, or t
  misc_feature (924)..(924): n is a, c, g, or t
  misc_feature (929)..(929): n is a, c, g, or t
  misc_feature (936)..(936): n is a, c, g, or t
  misc_feature (939)..(939): n is a, c, g, or t
  misc_feature (942)..(942): n is a, c, g, or t
  misc_feature (948)..(948): n is a, c, g, or t
  misc_feature (953)..(954): n is a, c, g, or t
  misc_feature (956)..(957): n is a, c, g, or t
  misc_feature (978)..(978): n is a, c, g, or t
  misc_feature (982)..(982): n is a, c, g, or t
  misc_feature (984)..(984): n is a, c, g, or t
  misc_feature (989)..(990): n is a, c, g, or t
  misc_feature (992)..(992): n is a, c, g, or t
  misc_feature (1000)..(1000): n is a, c, g, or t
  misc_feature (1013)..(1014): n is a, c, g, or t
  misc_feature (1018)..(1018): n is a, c, g, or t
  misc_feature (1023)..(1025): n is a, c, g, or t
  misc_feature (1028)..(1029): n is a, c, g, or t
  misc_feature (1034)..(1034): n is a, c, g, or t
  misc_feature (1036)..(1036): n is a, c, g, or t
  misc_feature (1041)..(1042): n is a, c, g, or t
  misc_feature (1045)..(1045): n is a, c, g, or t
  misc_feature (1049)..(1049): n is a, c, g, or t
  misc_feature (1051)..(1052): n is a, c, g, or t
  misc_feature (1057)..(1057): n is a, c, g, or t
  misc_feature (1060)..(1060): n is a, c, g, or t
  misc_feature (1065)..(1065): n is a, c, g, or t
  misc_feature (1069)..(1069): n is a, c, g, or t
  misc_feature (1073)..(1073): n is a, c, g, or t
  misc_feature (1075)..(1077): n is a, c, g, or t
  misc_feature (1088)..(1088): n is a, c, g, or t
  misc_feature (1094)..(1094): n is a, c, g, or t
  misc_feature (1096)..(1097): n is a, c, g, or t
  misc_feature (1100)..(1100): n is a, c, g, or t
  misc_feature (1109)..(1109): n is a, c, g, or t
  misc_feature (1112)..(1112): n is a, c, g, or t
  misc_feature (1127)..(1129): n is a, c, g, or t
  misc_feature (1132)..(1132): n is a, c, g, or t
  misc_feature (1139)..(1139): n is a, c, g, or t
  misc_feature (1149)..(1150): n is a, c, g, or t
  misc_feature (1159)..(1159): n is a, c, g, or t
  misc_feature (1167)..(1167): n is a, c, g, or t
  misc_feature (1173)..(1173): n is a, c, g, or t
  misc_feature (1177)..(1177): n is a, c, g, or t
  misc_feature (1182)..(1183): n is a, c, g, or t
  misc_feature (1189)..(1191): n is a, c, g, or t
  misc_feature (1195)..(1196): n is a, c, g, or t
  misc_feature (1201)..(1201): n is a, c, g, or t
  misc_feature (1204)..(1204): n is a, c, g, or t
  misc_feature (1214)..(1214): n is a, c, g, or t
  misc_feature (1216)..(1216): n is a, c, g, or t
  misc_feature (1218)..(1218): n is a, c, g, or t
  misc_feature (1228)..(1228): n is a, c, g, or t
  misc_feature (1236)..(1236): n is a, c, g, or t
  misc_feature (1240)..(1240): n is a, c, g, or t
  misc_feature (1245)..(1245): n is a, c, g, or t
  misc_feature (1249)..(1249): n is a, c, g, or t
  misc_feature (1255)..(1256): n is a, c, g, or t
  misc_feature (1258)..(1258): n is a, c, g, or t
  misc_feature (1263)..(1263): n is a, c, g, or t
  misc_feature (1268)..(1268): n is a, c, g, or t
  misc_feature (1275)..(1276): n is a, c, g, or t
  misc_feature (1280)..(1280): n is a, c, g, or t
  misc_feature (1283)..(1284): n is a, c, g, or t
  misc_feature (1290)..(1292): n is a, c, g, or t
  misc_feature (1298)..(1298): n is a, c, g, or t
  misc_feature (1311)..(1311): n is a, c, g, or t
  misc_feature (1313)..(1313): n is a, c, g, or t
  misc_feature (1315)..(1316): n is a, c, g, or t
  misc_feature (1322)..(1322): n is a, c, g, or t
  misc_feature (1333)..(1333): n is a, c, g, or t
  misc_feature (1337)..(1339): n is a, c, g, or t
  misc_feature (1345)..(1345): n is a, c, g, or t
  misc_feature (1354)..(1354): n is a, c, g, or t
  misc_feature (1358)..(1358): n is a, c, g, or t
  misc_feature (1360)..(1362): n is a, c, g, or t
  misc_feature (1369)..(1369): n is a, c, g, or t
  misc_feature (1374)..(1374): n is a, c, g, or t
  misc_feature (1381)..(1381): n is a, c, g, or t
  misc_feature (1389)..(1390): n is a, c, g, or t
  misc_feature (1395)..(1395): n is a, c, g, or t
  misc_feature (1398)..(1398): n is a, c, g, or t
  misc_feature (1401)..(1401): n is a, c, g, or t
  misc_feature (1403)..(1404): n is a, c, g, or t
  misc_feature (1408)..(1409): n is a, c, g, or t
  misc_feature (1414)..(1414): n is a, c, g, or t
  misc_feature (1416)..(1418): n is a, c, g, or t
  misc_feature (1423)..(1423): n is a, c, g, or t
  misc_feature (1425)..(1425): n is a, c, g, or t
  misc_feature (1429)..(1429): n is a, c, g, or t
  misc_feature (1437)..(1437): n is a, c, g, or t
  misc_feature (1439)..(1439): n is a, c, g, or t
  misc_feature (1441)..(1442): n is a, c, g, or t
  misc_feature (1445)..(1445): n is a, c, g, or t
  misc_feature (1453)..(1454): n is a, c, g, or t
  misc_feature (1459)..(1459): n is a, c, g, or t
  misc_feature (1468)..(1469): n is a, c, g, or t
  misc_feature (1473)..(1473): n is a, c, g, or t
  misc_feature (1482)..(1483): n is a, c, g, or t
  misc_feature (1486)..(1486): n is a, c, g, or t
  misc_feature (1489)..(1489): n is a, c, g, or t
  misc_feature (1510)..(1510): n is a, c, g, or t
  misc_feature (1520)..(1520): n is a, c, g, or t
  misc_feature (1522)..(1524): n is a, c, g, or t
  misc_feature (1528)..(1528): n is a, c, g, or t
  misc_feature (1530)..(1530): n is a, c, g, or t
  misc_feature (1533)..(1533): n is a, c, g, or t
gagagattactatgagaggatcgcatcaccatcaccntnacggatnctatttaggtgacactatagaatcgtcgacccacgcgtccgtgcgctgtgntcgaggggtgccggncangcctgagcgagcgagctagccagcaggcatcgagggggcgcggctgccgtccggacgagacaggcgaacccgacgcataagagtccaccaccggacagccagcacatccacgatggagcgtcttgtcncccgtgggaccttcccagtactagtgcgcaccagcgcctgccgcagcctcttcgggccggtggaccacgaggagctgagccgcgagctgcaggcccgcctggccgagctgaacgccgaggaccagaaccgctgggattacnacttccagcaggacatgccgctgcggggccctggacgcctgcagtggaccgaagtggacagcgactcggtgcccgcgttctaccgcgaganggtgcaggtggggcgctgccgcctgctgctggngccgcgncccgtcncggtcgcngtggttgtcancccgnccctcnagccnnccgctgattctctcgaanngnntctagnacgcnccgnannaagnttccntagtgacccgntcnncggttnncntttgtctntnnacgacnnnaatttcctatcnnttntantcagaattcaatctnantatccatnntannatttatagtntnnnattnnnttattnnnnnnnatatattaantnnttnncnnntnttttnttncaanantctnttnnnacttatntcnaatanctncattnactnntatatntntnacttatnnnnttntnnttancanntatttnttnnntttttntannaaatnntanatcnannttanntttatanttnannnntcnatatantntnttnannaaanatntntaaancattaantantanaaatanaatannanntttaaaatttaaataaatatnttantnttttnntnaaaataanctaaaatataatnnatcnataannnttnntcaanangtttnntcnaatntnntaatnttntattncatnaatnannntcaacttttancttttntnnatnaataaaaanttnattttttttttaacnnntanatctatnttatacactnnttatttcanatatgtantaaatngatnaatannttttannntacnnataantantataaatatnancnctaaatttcnatatttancttnacaanttantatatnntnaacanatacntcaatanntaanttnntatatnnncatatntatatttttaaananannttcaanatgattaatcntatnnnctccantctaataancacntnnntaacatntaacnatatatnatcttatnnttatnatnttnannatanntattntnnntactntnacanttatttanananntanaatattanntattnatataatanntttnaccacacanngtntantttaaaattcaatatatatcnctatatattncnnnttantnatncta

SEQ ID NO: 412 - DNA, 1434 bp, Homo Sapiens
  misc_feature (1)..(1): n is a, c, g, or t
  misc_feature (3)..(3): n is a, c, g, or t
  misc_feature (708)..(708): n is a, c, g, or t
  misc_feature (874)..(874): n is a, c, g, or t
  misc_feature (879)..(879): n is a, c, g, or t
  misc_feature (885)..(885): n is a, c, g, or t
  misc_feature (887)..(887): n is a, c, g, or t
  misc_feature (899)..(899): n is a, c, g, or t
  misc_feature (901)..(901): n is a, c, g, or t
  misc_feature (925)..(925): n is a, c, g, or t
  misc_feature (936)..(936): n is a, c, g, or t
  misc_feature (962)..(962): n is a, c, g, or t
  misc_feature (969)..(969): n is a, c, g, or t
  misc_feature (971)..(971): n is a, c, g, or t
  misc_feature (985)..(986): n is a, c, g, or t
  misc_feature (997)..(997): n is a, c, g, or t
  misc_feature (999)..(999): n is a, c, g, or t
  misc_feature (1002)..(1002): n is a, c, g, or t
  misc_feature (1019)..(1019): n is a, c, g, or t
  misc_feature (1027)..(1027): n is a, c, g, or t
  misc_feature (1029)..(1031): n is a, c, g, or t
  misc_feature (1033)..(1033): n is a, c, g, or t
  misc_feature (1041)..(1041): n is a, c, g, or t
  misc_feature (1055)..(1056): n is a, c, g, or t
  misc_feature (1062)..(1063): n is a, c, g, or t
  misc_feature (1067)..(1067): n is a, c, g, or t
  misc_feature (1069)..(1069): n is a, c, g, or t
  misc_feature (1082)..(1082): n is a, c, g, or t
  misc_feature (1085)..(1085): n is a, c, g, or t
  misc_feature (1087)..(1087): n is a, c, g, or t
  misc_feature (1089)..(1089): n is a, c, g, or t
  misc_feature (1093)..(1093): n is a, c, g, or t
  misc_feature (1096)..(1096): n is a, c, g, or t
  misc_feature (1102)..(1102): n is a, c, g, or t
  misc_feature (1108)..(1109): n is a, c, g, or t
  misc_feature (1112)..(1112): n is a, c, g, or t
  misc_feature (1115)..(1115): n is a, c, g, or t
  misc_feature (1117)..(1117): n is a, c, g, or t
  misc_feature (1119)..(1119): n is a, c, g, or t
  misc_feature (1123)..(1123): n is a, c, g, or t
  misc_feature (1134)..(1134): n is a, c, g, or t
  misc_feature (1136)..(1136): n is a, c, g, or t
  misc_feature (1140)..(1141): n is a, c, g, or t
  misc_feature (1151)..(1151): n is a, c, g, or t
  misc_feature (1154)..(1154): n is a, c, g, or t
  misc_feature (1158)..(1158): n is a, c, g, or t
  misc_feature (1164)..(1164): n is a, c, g, or t
  misc_feature (1180)..(1180): n is a, c, g, or t
  misc_feature (1187)..(1187): n is a, c, g, or t
  misc_feature (1190)..(1192): n is a, c, g, or t
  misc_feature (1194)..(1194): n is a, c, g, or t
  misc_feature (1196)..(1197): n is a, c, g, or t
  misc_feature (1202)..(1203): n is a, c, g, or t
  misc_feature (1206)..(1207): n is a, c, g, or t
  misc_feature (1209)..(1209): n is a, c, g, or t
  misc_feature (1215)..(1215): n is a, c, g, or t
  misc_feature (1218)..(1218): n is a, c, g, or t
  misc_feature (1220)..(1220): n is a, c, g, or t
  misc_feature (1223)..(1223): n is a, c, g, or t
  misc_feature (1228)..(1228): n is a, c, g, or t
  misc_feature (1231)..(1231): n is a, c, g, or t
  misc_feature (1239)..(1240): n is a, c, g, or t
  misc_feature (1244)..(1244): n is a, c, g, or t
  misc_feature (1250)..(1250): n is a, c, g, or t
  misc_feature (1252)..(1252): n is a, c, g, or t
  misc_feature (1254)..(1254): n is a, c, g, or t
  misc_feature (1259)..(1260): n is a, c, g, or t
  misc_feature (1271)..(1272): n is a, c, g, or t
  misc_feature (1275)..(1275): n is a, c, g, or t
  misc_feature (1279)..(1279): n is a, c, g, or t
  misc_feature (1295)..(1295): n is a, c, g, or t
  misc_feature (1298)..(1298): n is a, c, g, or t
  misc_feature (1301)..(1301): n is a, c, g, or t
  misc_feature (1304)..(1304): n is a, c, g, or t
  misc_feature (1309)..(1309): n is a, c, g, or t
  misc_feature (1319)..(1320): n is a, c, g, or t
  misc_feature (1324)..(1324): n is a, c, g, or t
  misc_feature (1329)..(1330): n is a, c, g, or t
  misc_feature (1339)..(1340): n is a, c, g, or t
  misc_feature (1346)..(1346): n is a, c, g, or t
  misc_feature (1357)..(1357): n is a, c, g, or t
  misc_feature (1361)..(1361): n is a, c, g, or t
  misc_feature (1372)..(1372): n is a, c, g, or t
  misc_feature (1376)..(1377): n is a, c, g, or t
  misc_feature (1379)..(1379): n is a, c, g, or t
  misc_feature (1381)..(1381): n is a, c, g, or t
  misc_feature (1383)..(1383): n is a, c, g, or t
  misc_feature (1385)..(1385): n is a, c, g, or t
  misc_feature (1388)..(1388): n is a, c, g, or t
  misc_feature (1390)..(1390): n is a, c, g, or t
  misc_feature (1401)..(1403): n is a, c, g, or t
  misc_feature (1410)..(1412): n is a, c, g, or t
  misc_feature (1415)..(1415): n is a, c, g, or t
  misc_feature (1421)..(1421): n is a, c, g, or t
  misc_feature (1425)..(1426): n is a, c, g, or t
nanttagagaaattactatgagaggatcgcatcaccatcaccatcacggatcctatttaggtgacactatagaatcgtcgacccacgcgtccgggcatatgcctcccagagaggaggaagaagaggaagaggaagaggaggagagggagaaggaagaggtagagaaacaagaggaggaggaagaggaggagctgctccctgtgaatggatcccaagaagaagccaagcctcaggtccgtgacttttctctcaccagcagcagccagaccccaggggccaccaaaagcaggcatgaagactccggggaccaggcctcatcaggtgtggaggtggagagcagcatggggcccagcttgctgctgccttcagtcaccccaactacagtgactccgggggaccaggactccaccagccaagaggcagaggccacagtgctgccagctgcagggcttggggtagagttcgaggctcctcaggaagcaagcgaggaagccactgcaggagcagctggtttgtctggccagcacgaggaggtgccggccttgccttcattccctcaaaccacagctcccagtggggccgagcacccagatgaagatccccttggctctagaacctcagcctcttccccactggcccctggagacatggaactgacaccttcctctgctaccttgggacaagaagatctcaaccagcagctcctanaagggcaggcagctgaagctcaatccaggataccctgggattctacgcaggtgatctgcaaggactggagcaatctggctgggaaaaaactacatcattctgaacatgacagaaaaacatagactgtgaaggtgttccggcagcaccgggggccacagctcctggncctgntggaanangttgctgccccncncatgggcattggcccccatggggncctggcacatnttttctaaacaagccccagcgaaaangaaccancnccttttttcatgannacttggtgggncnaancaggggggtggtgcccnacttcaanannntncttttccnatgcttgggttaanntccccnngaancntggaaggaaattngcntncnaaanttntttccncaaccnncanctncnangggncgggccaaccnangtgnncaacgattanggnaccntttttngtggttggggggcttnggggccnttnnntnanntcaannttnncnttgggnccncnctnaaaanttntgggaaanncggnttcccnantntaacnnttttttccaannaanaaanttcctttcttgaaaanctnttnccnaaaanccccccttgnnattnccccnnccccctttnnaatttnaaaaacccccncttnagggggggccntatnncngnantntgntnttggggtatcnnnaccaaannnaantttttnaaannccctttat

SEQ ID NO: 413 - DNA, 1351 bp, Homo Sapiens; identical to SEQ ID NO: 22
  misc_feature (897)..(897): n is a, c, g, or t
  misc_feature (900)..(900): n is a, c, g, or t
  misc_feature (914)..(914): n is a, c, g, or t
  misc_feature (929)..(929): n is a, c, g, or t
  misc_feature (944)..(944): n is a, c, g, or t
  misc_feature (948)..(948): n is a, c, g, or t
  misc_feature (965)..(965): n is a, c, g, or t
  misc_feature (973)..(973): n is a, c, g, or t
  misc_feature (977)..(977): n is a, c, g, or t
  misc_feature (982)..(982): n is a, c, g, or t
  misc_feature (985)..(985): n is a, c, g, or t
  misc_feature (987)..(987): n is a, c, g, or t
  misc_feature (1014)..(1015): n is a, c, g, or t
  misc_feature (1027)..(1027): n is a, c, g, or t
  misc_feature (1032)..(1032): n is a, c, g, or t
  misc_feature (1035)..(1035): n is a, c, g, or t
  misc_feature (1045)..(1045): n is a, c, g, or t
  misc_feature (1049)..(1049): n is a, c, g, or t
  misc_feature (1056)..(1056): n is a, c, g, or t
  misc_feature (1066)..(1066): n is a, c, g, or t
  misc_feature (1082)..(1082): n is a, c, g, or t
  misc_feature (1091)..(1091): n is a, c, g, or t
  misc_feature (1103)..(1104): n is a, c, g, or t
  misc_feature (1107)..(1107): n is a, c, g, or t
  misc_feature (1109)..(1109): n is a, c, g, or t
  misc_feature (1113)..(1113): n is a, c, g, or t
  misc_feature (1128)..(1129): n is a, c, g, or t
  misc_feature (1134)..(1134): n is a, c, g, or t
  misc_feature (1138)..(1140): n is a, c, g, or t
  misc_feature (1145)..(1145): n is a, c, g, or t
  misc_feature (1147)..(1147): n is a, c, g, or t
  misc_feature (1157)..(1160): n is a, c, g, or t
  misc_feature (1170)..(1170): n is a, c, g, or t
  misc_feature (1172)..(1175): n is a, c, g, or t
  misc_feature (1177)..(1178): n is a, c, g, or t
  misc_feature (1182)..(1183): n is a, c, g, or t
  misc_feature (1185)..(1185): n is a, c, g, or t
  misc_feature (1194)..(1196): n is a, c, g, or t
  misc_feature (1203)..(1203): n is a, c, g, or t
  misc_feature (1207)..(1207): n is a, c, g, or t
  misc_feature (1209)..(1210): n is a, c, g, or t
  misc_feature (1216)..(1216): n is a, c, g, or t
  misc_feature (1218)..(1218): n is a, c, g, or t
  misc_feature (1220)..(1224): n is a, c, g, or t
  misc_feature (1231)..(1231): n is a, c, g, or t
  misc_feature (1233)..(1233): n is a, c, g, or t
  misc_feature (1241)..(1242): n is a, c, g, or t
  misc_feature (1245)..(1247): n is a, c, g, or t
  misc_feature (1252)..(1253): n is a, c, g, or t
  misc_feature (1256)..(1256): n is a, c, g, or t
  misc_feature (1265)..(1265): n is a, c, g, or t
  misc_feature (1270)..(1270): n is a, c, g, or t
  misc_feature (1272)..(1272): n is a, c, g, or t
  misc_feature (1277)..(1277): n is a, c, g, or t
  misc_feature (1280)..(1281): n is a, c, g, or t
  misc_feature (1286)..(1286): n is a, c, g, or t
  misc_feature (1289)..(1292): n is a, c, g, or t
  misc_feature (1297)..(1303): n is a, c, g, or t
  misc_feature (1307)..(1309): n is a, c, g, or t
  misc_feature (1313)..(1313): n is a, c, g, or t
  misc_feature (1317)..(1317): n is a, c, g, or t
  misc_feature (1319)..(1320): n is a, c, g, or t
  misc_feature (1323)..(1325): n is a, c, g, or t
  misc_feature (1335)..(1335): n is a, c, g, or t
  misc_feature (1340)..(1340): n is a, c, g, or t
  misc_feature (1345)..(1345): n is a, c, g, or t
  misc_feature (1350)..(1351): n is a, c, g, or t

SEQ ID NO: 414 - DNA, 1330 bp, Homo Sapiens; identical to SEQ ID NO: 219
  misc_feature (703)..(703): n is a, c, g, or t
  misc_feature (771)..(771): n is a, c, g, or t
  misc_feature (847)..(847): n is a, c, g, or t
  misc_feature (868)..(868): n is a, c, g, or t
  misc_feature (886)..(886): n is a, c, g, or t
  misc_feature (892)..(892): n is a, c, g, or t
  misc_feature (921)..(921): n is a, c, g, or t
  misc_feature (929)..(929): n is a, c, g, or t
  misc_feature (935)..(935): n is a, c, g, or t
  misc_feature (963)..(963): n is a, c, g, or t
  misc_feature (984)..(984): n is a, c, g, or t
  misc_feature (997)..(997): n is a, c, g, or t
  misc_feature (1006)..(1006): n is a, c, g, or t
  misc_feature (1012)..(1012): n is a, c, g, or t
  misc_feature (1022)..(1022): n is a, c, g, or t
  misc_feature (1027)..(1027): n is a, c, g, or t
  misc_feature (1029)..(1029): n is a, c, g, or t
  misc_feature (1032)..(1032): n is a, c, g, or t
  misc_feature (1048)..(1048): n is a, c, g, or t
  misc_feature (1065)..(1065): n is a, c, g, or t
  misc_feature (1082)..(1082): n is a, c, g, or t
  misc_feature (1092)..(1092): n is a, c, g, or t
  misc_feature (1098)..(1098): n is a, c, g, or t
  misc_feature (1115)..(1115): n is a, c, g, or t
  misc_feature (1123)..(1123): n is a, c, g, or t
  misc_feature (1125)..(1125): n is a, c, g, or t
  misc_feature (1137)..(1137): n is a, c, g, or t
  misc_feature (1141)..(1141): n is a, c, g, or t
  misc_feature (1145)..(1145): n is a, c, g, or t
  misc_feature (1150)..(1150): n is a, c, g, or t
  misc_feature (1160)..(1163): n is a, c, g, or t
  misc_feature (1166)..(1166): n is a, c, g, or t
  misc_feature (1173)..(1173): n is a, c, g, or t
  misc_feature (1175)..(1175): n is a, c, g, or t
  misc_feature (1190)..(1190): n is a, c, g, or t
  misc_feature (1195)..(1195): n is a, c, g, or t
  misc_feature (1198)..(1198): n is a, c, g, or t
  misc_feature (1206)..(1206): n is a, c, g, or t
  misc_feature (1213)..(1214): n is a, c, g, or t
  misc_feature (1223)..(1223): n is a, c, g, or t
  misc_feature (1240)..(1241): n is a, c, g, or t
  misc_feature (1248)..(1248): n is a, c, g, or t
  misc_feature (1250)..(1251): n is a, c, g, or t
  misc_feature (1254)..(1258): n is a, c, g, or t
  misc_feature (1262)..(1263): n is a, c, g, or t
  misc_feature (1265)..(1265): n is a, c, g, or t
  misc_feature (1267)..(1271): n is a, c, g, or t
  misc_feature (1273)..(1273): n is a, c, g, or t
  misc_feature (1277)..(1277): n is a, c, g, or t
  misc_feature (1280)..(1282): n is a, c, g, or t
  misc_feature (1286)..(1288): n is a, c, g, or t
  misc_feature (1292)..(1292): n is a, c, g, or t
  misc_feature (1295)..(1295): n is a, c, g, or t
  misc_feature (1297)..(1297): n is a, c, g, or t
  misc_feature (1300)..(1303): n is a, c, g, or t
  misc_feature (1314)..(1317): n is a, c, g, or t
  misc_feature (1322)..(1322): n is a, c, g, or t
  misc_feature (1329)..(1329): n is a, c, g, or t

SEQ ID NO: 415 - DNA, 1313 bp, Homo Sapiens; identical to SEQ ID NO: 128
  misc_feature (1)..(1): n is a, c, g, or t
  misc_feature (846)..(846): n is a, c, g, or t
  misc_feature (884)..(884): n is a, c, g, or t
  misc_feature (928)..(928): n is a, c, g, or t
  misc_feature (930)..(930): n is a, c, g, or t
  misc_feature (953)..(953): n is a, c, g, or t
  misc_feature (958)..(958): n is a, c, g, or t
  misc_feature (963)..(964): n is a, c, g, or t
  misc_feature (975)..(975): n is a, c, g, or t
  misc_feature (981)..(981): n is a, c, g, or t
  misc_feature (987)..(987): n is a, c, g, or t
  misc_feature (1000)..(1000): n is a, c, g, or t
  misc_feature (1006)..(1006): n is a, c, g, or t
  misc_feature (1018)..(1018): n is a, c, g, or t
  misc_feature (1035)..(1035): n is a, c, g, or t
  misc_feature (1057)..(1057): n is a, c, g, or t
  misc_feature (1061)..(1061): n is a, c, g, or t
  misc_feature (1066)..(1066): n is a, c, g, or t
  misc_feature (1070)..(1070): n is a, c, g, or t
  misc_feature (1072)..(1072): n is a, c, g, or t
  misc_feature (1078)..(1078): n is a, c, g, or t
  misc_feature (1084)..(1084): n is a, c, g, or t
  misc_feature (1102)..(1103): n is a, c, g, or t
  misc_feature (1108)..(1108): n is a, c, g, or t
  misc_feature (1110)..(1110): n is a, c, g, or t
  misc_feature (1113)..(1113): n is a, c, g, or t
  misc_feature (1117)..(1117): n is a, c, g, or t
  misc_feature (1121)..(1121): n is a, c, g, or t
  misc_feature (1124)..(1124): n is a, c, g, or t
  misc_feature (1136)..(1137): n is a, c, g, or t
  misc_feature (1147)..(1147): n is a, c, g, or t
  misc_feature (1154)..(1155): n is a, c, g, or t
  misc_feature (1158)..(1159): n is a, c, g, or t
  misc_feature (1164)..(1164): n is a, c, g, or t
  misc_feature (1169)..(1169): n is a, c, g, or t
  misc_feature (1179)..(1179): n is a, c, g, or t
  misc_feature (1181)..(1182): n is a, c, g, or t
  misc_feature (1185)..(1185): n is a, c, g, or t
  misc_feature (1188)..(1188): n is a, c, g, or t
  misc_feature (1191)..(1191): n is a, c, g, or t
  misc_feature (1194)..(1194): n is a, c, g, or t
  misc_feature (1198)..(1198): n is a, c, g, or t
  misc_feature (1200)..(1200): n is a, c, g, or t
  misc_feature (1204)..(1205): n is a, c, g, or t
  misc_feature (1210)..(1210): n is a, c, g, or t
  misc_feature (1214)..(1215): n is a, c, g, or t
  misc_feature (1220)..(1221): n is a, c, g, or t
  misc_feature (1223)..(1223): n is a, c, g, or t
  misc_feature (1227)..(1227): n is a, c, g, or t
  misc_feature (1233)..(1234): n is a, c, g, or t
  misc_feature (1236)..(1236): n is a, c, g, or t
  misc_feature (1239)..(1239): n is a, c, g, or t
  misc_feature (1241)..(1241): n is a, c, g, or t
  misc_feature (1247)..(1247): n is a, c, g, or t
  misc_feature (1256)..(1256): n is a, c, g, or t
  misc_feature (1258)..(1259): n is a, c, g, or t
  misc_feature (1264)..(1265): n is a, c, g, or t
  misc_feature (1270)..(1270): n is a, c, g, or t
  misc_feature (1276)..(1276): n is a, c, g, or t
  misc_feature (1278)..(1278): n is a, c, g, or t
  misc_feature (1287)..(1288): n is a, c, g, or t
  misc_feature (1290)..(1291): n is a, c, g, or t
  misc_feature (1296)..(1299): n is a, c, g, or t
  misc_feature (1303)..(1303): n is a, c, g, or t
  misc_feature (1308)..(1308): n is a, c, g, or t
  misc_feature (1310)..(1312): n is a, c, g, or t

SEQ ID NO: 416 - DNA, 1188 bp, Homo Sapiens
ttctttaaggagggagaaattaactatgagaggtcgcatcaccatcaccatcacggatcctatttaggtgacactatagaatcgtcgacccacgcgtccgaccagccttcaatgaaagaagaaagcaaaatgaatattggcatggaaaccttgccacatgaaaggctattgcactacaaagtaaaccctgaattcaatatgaatccccctgtaatggaccagttcaatatgaacttagagcaacatctcgcaccccaggaacatatgcagaatttgccctttgaacctcgcacagctgtgaagaatttcatggcctctgagttggatgataatgcaggactatcaagaagtgaaactggatcaacgatatcaatgagttctttagagagaagaaaatcacgatattcagaccttgactttgagaaggtcatgcatacaaggaagaggcatatggaactatttcaagaactaaatcagaaatttcaaactttggacagatttcgggatataccaaatacaagcagtatggaaaaccccgcaccaaacaagaatccatgggacactttcaaaaaccccagtgaatacccgcattacaccacaatcaatgtcttagacacagaggcaaaggatgctttggaactgaggccagcagagtgggagaagtgtctgaatttgcctctggatgtgcaagagggtgactttcaaacagaagtttaaaaaaatcaaaatggactaaggtagagacaaaactttattgcactgacacttaagacttgggaagcctgacatttctatctggacagtgtgactatcttatgtcaggaccttcatgtgccaaacgtcagtggtgttttcatatggtaacttctcactagtcaggctagtggagagatgaccaggtgtacagttctgaccatcctgtgttgtaagtacccgtggaatggatttgtaaggtaatctttatagataaacctcaagcaacgattcatgttgtaaccgcttcatatggtttagttttcaaaaacttcaccatgaagcacaatgtatatatttatgcagttttaaagttataacagtctgtttgtcatactacacttttactttataaatataaagcaaagttttgtcataatgatggtgtggctacattctcatgcttaatgcaataaagtaataatcctcacgtgg

SEQ ID NO: 417 - DNA, 1435 bp, Homo Sapiens; identical to SEQ ID NO: 335
  misc_feature (1)..(1): n is a, c, g, or t
  misc_feature (3)..(3): n is a, c, g, or t
  misc_feature (762)..(762): n is a, c, g, or t
  misc_feature (811)..(811): n is a, c, g, or t
  misc_feature (897)..(897): n is a, c, g, or t
  misc_feature (908)..(908): n is a, c, g, or t
  misc_feature (957)..(957): n is a, c, g, or t
  misc_feature (973)..(973): n is a, c, g, or t
  misc_feature (976)..(976): n is a, c, g, or t
  misc_feature (980)..(980): n is a, c, g, or t
  misc_feature (998)..(999): n is a, c, g, or t
  misc_feature (1002)..(1002): n is a, c, g, or t
  misc_feature (1007)..(1007): n is a, c, g, or t
  misc_feature (1013)..(1013): n is a, c, g, or t
  misc_feature (1017)..(1017): n is a, c, g, or t
  misc_feature (1031)..(1031): n is a, c, g, or t
  misc_feature (1036)..(1036): n is a, c, g, or t
  misc_feature (1044)..(1045): n is a, c, g, or t
  misc_feature (1052)..(1053): n is a, c, g, or t
  misc_feature (1059)..(1059): n is a, c, g, or t
  misc_feature (1067)..(1067): n is a, c, g, or t
  misc_feature (1070)..(1070): n is a, c, g, or t
  misc_feature (1072)..(1072): n is a, c, g, or t
  misc_feature (1075)..(1075): n is a, c, g, or t
  misc_feature (1085)..(1085): n is a, c, g, or t
  misc_feature (1093)..(1093): n is a, c, g, or t
  misc_feature (1111)..(1111): n is a, c, g, or t
  misc_feature (1122)..(1123): n is a, c, g, or t
  misc_feature (1134)..(1134): n is a, c, g, or t
  misc_feature (1140)..(1140): n is a, c, g, or t
  misc_feature (1148)..(1148): n is a, c, g, or t
  misc_feature (1150)..(1150): n is a, c, g, or t
  misc_feature (1157)..(1158): n is a, c, g, or t
  misc_feature (1162)..(1162): n is a, c, g, or t
  misc_feature (1164)..(1165): n is a, c, g, or t
  misc_feature (1169)..(1169): n is a, c, g, or t
  misc_feature (1187)..(1187): n is a, c, g, or t
  misc_feature (1192)..(1192): n is a, c, g, or t
  misc_feature (1197)..(1197): n is a, c, g, or t
  misc_feature (1207)..(1207): n is a, c, g, or t
  misc_feature (1222)..(1222): n is a, c, g, or t
  misc_feature (1229)..(1229): n is a, c, g, or t
  misc_feature (1237)..(1237): n is a, c, g, or t
  misc_feature (1249)..(1249): n is a, c, g, or t
  misc_feature (1255)..(1255): n is a, c, g, or t
  misc_feature (1260)..(1260): n is a, c, g, or t
  misc_feature (1266)..(1266): n is a, c, g, or t
  misc_feature (1268)..(1268): n is a, c, g, or t
  misc_feature (1276)..(1276): n is a, c, g, or t
  misc_feature (1278)..(1278): n is a, c, g, or t
  misc_feature (1288)..(1288): n is a, c, g, or t
  misc_feature (1290)..(1290): n is a, c, g, or t
  misc_feature (1292)..(1292): n is a, c, g, or t
  misc_feature (1294)..(1294): n is a, c, g, or t
  misc_feature (1297)..(1297): n is a, c, g, or t
  misc_feature (1304)..(1304): n is a, c, g, or t
  misc_feature (1312)..(1312): n is a, c, g, or t
  misc_feature (1316)..(1316): n is a, c, g, or t
  misc_feature (1321)..(1321): n is a, c, g, or t
  misc_feature (1323)..(1323): n is a, c, g, or t
  misc_feature (1336)..(1336): n is a, c, g, or t
  misc_feature (1343)..(1343): n is a, c, g, or t
  misc_feature (1352)..(1352): n is a, c, g, or t
  misc_feature (1354)..(1354): n is a, c, g, or t
  misc_feature (1357)..(1357): n is a, c, g, or t
  misc_feature (1362)..(1362): n is a, c, g, or t
  misc_feature (1365)..(1365): n is a, c, g, or t
  misc_feature (1368)..(1369): n is a, c, g, or t
  misc_feature (1374)..(1374): n is a, c, g, or t
  misc_feature (1384)..(1384): n is a, c, g, or t
  misc_feature (1386)..(1386): n is a, c, g, or t
  misc_feature (1389)..(1390): n is a, c, g, or t
  misc_feature (1394)..(1394): n is a, c, g, or t
  misc_feature (1400)..(1400): n is a, c, g, or t
  misc_feature (1403)..(1403): n is a, c, g, or t
  misc_feature (1412)..(1412): n is a, c, g, or t

SEQ ID NO: 418 - DNA, 1379 bp, Homo Sapiens
  misc_feature (2)..(2): n is a, c, g, or t
  misc_feature (640)..(640): n is a, c, g, or t
  misc_feature (724)..(724): n is a, c, g, or t
  misc_feature (736)..(736): n is a, c, g, or t
  misc_feature (746)..(746): n is a, c, g, or t
  misc_feature (756)..(756): n is a, c, g, or t
  misc_feature (765)..(765): n is a, c, g, or t
  misc_feature (789)..(789): n is a, c, g, or t
  misc_feature (801)..(801): n is a, c, g, or t
  misc_feature (808)..(808): n is a, c, g, or t
  misc_feature (826)..(826): n is a, c, g, or t
  misc_feature (838)..(838): n is a, c, g, or t
  misc_feature (840)..(840): n is a, c, g, or t
  misc_feature (842)..(842): n is a, c, g, or t
  misc_feature (847)..(847): n is a, c, g, or t
  misc_feature (849)..(849): n is a, c, g, or t
  misc_feature (851)..(851): n is a, c, g, or t
  misc_feature (861)..(861): n is a, c, g, or t
  misc_feature (864)..(864): n is a, c, g, or t
  misc_feature (866)..(866): n is a, c, g, or t
  misc_feature (880)..(880): n is a, c, g, or t
  misc_feature (885)..(885): n is a, c, g, or t
  misc_feature (903)..(903): n is a, c, g, or t
  misc_feature (921)..(921): n is a, c, g, or t
  misc_feature (930)..(930): n is a, c, g, or t
  misc_feature (937)..(937): n is a, c, g, or t
  misc_feature (943)..(943): n is a, c, g, or t
  misc_feature (945)..(945): n is a, c, g, or t
  misc_feature (949)..(950): n is a, c, g, or t
  misc_feature (961)..(961): n is a, c, g, or t
  misc_feature (964)..(964): n is a, c, g, or t
  misc_feature (968)..(968): n is a, c, g, or t
  misc_feature (978)..(978): n is a, c, g, or t
  misc_feature (980)..(981): n is a, c, g, or t
  misc_feature (999)..(999): n is a, c, g, or t
  misc_feature (1002)..(1002): n is a, c, g, or t
  misc_feature (1004)..(1004): n is a, c, g, or t
  misc_feature (1016)..(1016): n is a, c, g, or t
  misc_feature (1023)..(1023): n is a, c, g, or t
  misc_feature (1029)..(1029): n is a, c, g, or t
  misc_feature (1041)..(1041): n is a, c, g, or t
  misc_feature (1047)..(1047): n is a, c, g, or t
  misc_feature (1051)..(1051): n is a, c, g, or t
  misc_feature (1056)..(1056): n is a, c, g, or t
  misc_feature (1062)..(1062): n is a, c, g, or t
  misc_feature (1079)..(1079): n is a, c, g, or t
  misc_feature (1084)..(1086): n is a, c, g, or t
  misc_feature (1090)..(1090): n is a, c, g, or t
  misc_feature (1100)..(1100): n is a, c, g, or t
  misc_feature (1104)..(1104): n is a, c, g, or t
  misc_feature (1115)..(1116): n is a, c, g, or t
  misc_feature (1118)..(1118): n is a, c, g, or t
  misc_feature (1121)..(1121): n is a, c, g, or t
  misc_feature (1123)..(1123): n is a, c, g, or t
  misc_feature (1128)..(1128): n is a, c, g, or t
  misc_feature (1131)..(1132): n is a, c, g, or t
  misc_feature (1140)..(1140): n is a, c, g, or t
  misc_feature (1143)..(1143): n is a, c, g, or t
  misc_feature (1153)..(1153): n is a, c, g, or t
  misc_feature (1161)..(1161): n is a, c, g, or t
  misc_feature (1163)..(1163): n is a, c, g, or t
  misc_feature (1165)..(1165): n is a, c, g, or t
  misc_feature (1170)..(1173): n is a, c, g, or t
  misc_feature (1179)..(1179): n is a, c, g, or t
  misc_feature (1185)..(1185): n is a, c, g, or t
  misc_feature (1189)..(1189): n is a, c, g, or t
  misc_feature (1192)..(1192): n is a, c, g, or t
  misc_feature (1194)..(1195): n is a, c, g, or t
  misc_feature (1198)..(1198): n is a, c, g, or t
  misc_feature (1208)..(1208): n is a, c, g, or t
  misc_feature (1211)..(1211): n is a, c, g, or t
  misc_feature (1214)..(1214): n is a, c, g, or t
  misc_feature (1223)..(1223): n is a, c, g, or t
  misc_feature (1225)..(1225): n is a, c, g, or t
  misc_feature (1233)..(1233): n is a, c, g, or t
  misc_feature (1259)..(1259): n is a, c, g, or t
  misc_feature (1269)..(1269): n is a, c, g, or t
  misc_feature (1272)..(1272): n is a, c, g, or t
  misc_feature (1277)..(1279): n is a, c, g, or t
  misc_feature (1290)..(1290): n is a, c, g, or t
  misc_feature (1292)..(1293): n is a, c, g, or t
  misc_feature (1295)..(1295): n is a, c, g, or t
  misc_feature (1302)..(1302): n is a, c, g, or t
  misc_feature (1305)..(1305): n is a, c, g, or t
  misc_feature (1308)..(1308): n is a, c, g, or t
  misc_feature (1320)..(1320): n is a, c, g, or t
  misc_feature (1322)..(1323): n is a, c, g, or t
  misc_feature (1327)..(1328): n is a, c, g, or t
  misc_feature (1331)..(1333): n is a, c, g, or t
  misc_feature (1342)..(1342): n is a, c, g, or t
  misc_feature (1344)..(1345): n is a, c, g, or t
  misc_feature (1347)..(1347): n is a, c, g, or t
  misc_feature (1353)..(1355): n is a, c, g, or t
  misc_feature (1358)..(1358): n is a, c, g, or t
  misc_feature (1360)..(1360): n is a, c, g, or t
  misc_feature (1369)..(1369): n is a, c, g, or t
  misc_feature (1373)..(1373): n is a, c, g, or t
  misc_feature (1379)..(1379): n is a, c, g, or t
cnaatagagaaattactatgagaggatcgcatcaccatcaccatcacggatcctatttaggtgacactatagaatcgtcgacccacgcgtccgggccggggccgggaccgggaccctcgcggcagacatggacttgcattgtgactgtgccgccgaaacgccggccgccgagccgccgtcggggaagattaataaagctgccttcaaattattcaagaagaggaaatcgggtggcaccatgcccagcatttttggggtcaaaaacaaaggggacgggaaaagctcgggtccgacggggctggtgaggagcaggacccacgacggacttgccgaggtgctggtgctggagagcggcaggaaggaggagccgcgcggcgggggcgacagcggcgggggcggcggggggcggccgaacccggggccccccagagccgcagggcccggcgggggctccctcgccagcagctcggtggccaagtcgcacagcttcttctcgctgctgaagaagaacgggcgctcggaaaacggcaagggagagcctgtggacgcgagcaaggccggcggcaaacaaaagcgggggctgcgggggctgttcagcggcatgcgctggcacaggaaagacaagcgggccaaggcggangccgcggaggggcgcgcgcccgggggcggcttgatcctacccggctcgctcaccgccagcctggagtgcgtcaaggaggagacncccagagccgcncgcgagccgnaagaacccancccaggacncccccgcgagacccagccaggctnttggagatattntttgcanaccaagaaggaataggcnggtcccagcttntnanaaagnantnttccccgggncangncaaagcccggtttnttttntaaaaaaaaaaccccggntttggtggcctaccaagnaagccgggnaaaaaantggccnancccnngaacaaagttnganaaanccctaatctnanngaatttttgggaaaattnctntnccaaaaccctantaactanggaccncaatcccccaanaagggncccnttctnaaagtngcaacctttccctctgnaaaannnaagnttttcccccnaaancccccaaaaanncncantnttgtnttnnaaaaccgncanaaaacccctncttctttnanancttannnngttttnaccganattnccntnnagncccccttttnaanaantaaccccancncccccctnaaaaaaaaatactctaatatttctcncccacatcanaanaaagnnntttctgtgaantnncnccccccnctnccncaaaaaaaaaancnntttnntannngaaaaaatngnntntccccnnnatntnttcctgtgngacnctcttn

SEQ ID NO: 419 - DNA, 1439 bp, Homo Sapiens
  misc_feature (4)..(4): n is a, c, g, or t
  misc_feature (507)..(507): n is a, c, g, or t
  misc_feature (654)..(654): n is a, c, g, or t
  misc_feature (709)..(709): n is a, c, g, or t
  misc_feature (729)..(729): n is a, c, g, or t
  misc_feature (769)..(769): n is a, c, g, or t
  misc_feature (772)..(772): n is a, c, g, or t
  misc_feature (806)..(806): n is a, c, g, or t
  misc_feature (812)..(812): n is a, c, g, or t
  misc_feature (834)..(834): n is a, c, g, or t
  misc_feature (890)..(890): n is a, c, g, or t
  misc_feature (894)..(894): n is a, c, g, or t
  misc_feature (904)..(904): n is a, c, g, or t
  misc_feature (950)..(950): n is a, c, g, or t
  misc_feature (960)..(960): n is a, c, g, or t
  misc_feature (962)..(962): n is a, c, g, or t
  misc_feature (965)..(965): n is a, c, g, or t
  misc_feature (980)..(980): n is a, c, g, or t
  misc_feature (989)..(989): n is a, c, g, or t
  misc_feature (1000)..(1000): n is a, c, g, or t
  misc_feature (1023)..(1023): n is a, c, g, or t
  misc_feature (1025)..(1025): n is a, c, g, or t
  misc_feature (1058)..(1058): n is a, c, g, or t
  misc_feature (1061)..(1061): n is a, c, g, or t
  misc_feature (1092)..(1092): n is a, c, g, or t
  misc_feature (1110)..(1110): n is a, c, g, or t
  misc_feature (1118)..(1118): n is a, c, g, or t
  misc_feature (1128)..(1128): n is a, c, g, or t
  misc_feature (1130)..(1132): n is a, c, g, or t
  misc_feature (1137)..(1137): n is a, c, g, or t
  misc_feature (1153)..(1153): n is a, c, g, or t
  misc_feature (1164)..(1164): n is a, c, g, or t
  misc_feature (1184)..(1184): n is a, c, g, or t
  misc_feature (1187)..(1187): n is a, c, g, or t
  misc_feature (1194)..(1194): n is a, c, g, or t
  misc_feature (1199)..(1200): n is a, c, g, or t
  misc_feature (1209)..(1210): n is a, c, g, or t
  misc_feature (1219)..(1219): n is a, c, g, or t
  misc_feature (1221)..(1221): n is a, c, g, or t
  misc_feature (1223)..(1224): n is a, c, g, or t
  misc_feature (1231)..(1231): n is a, c, g, or t
  misc_feature (1233)..(1234): n is a, c, g, or t
  misc_feature (1236)..(1236): n is a, c, g, or t
  misc_feature (1239)..(1239): n is a, c, g, or t
  misc_feature (1241)..(1242): n is a, c, g, or t
  misc_feature (1244)..(1244): n is a, c, g, or t
  misc_feature (1251)..(1251): n is a, c, g, or t
  misc_feature (1254)..(1254): n is a, c, g, or t
  misc_feature (1259)..(1259): n is a, c, g, or t
  misc_feature (1261)..(1262): n is a, c, g, or t
  misc_feature (1264)..(1264): n is a, c, g, or t
  misc_feature (1269)..(1269): n is a, c, g, or t
  misc_feature (1276)..(1277): n is a, c, g, or t
  misc_feature (1279)..(1279): n is a, c, g, or t
  misc_feature (1281)..(1281): n is a, c, g, or t
  misc_feature (1287)..(1287): n is a, c, g, or t
  misc_feature (1303)..(1303): n is a, c, g, or t
  misc_feature (1314)..(1314): n is a, c, g, or t
  misc_feature (1329)..(1329): n is a, c, g, or t
  misc_feature (1336)..(1336): n is a, c, g, or t
  misc_feature (1339)..(1339): n is a, c, g, or t
  misc_feature (1341)..(1341): n is a, c, g, or t
  misc_feature (1345)..(1345): n is a, c, g, or t
  misc_feature (1355)..(1355): n is a, c, g, or t
  misc_feature (1361)..(1361): n is a, c, g, or t
  misc_feature (1366)..(1366): n is a, c, g, or t
  misc_feature (1372)..(1372): n is a, c, g, or t
  misc_feature (1380)..(1381): n is a, c, g, or t
  misc_feature (1389)..(1389): n is a, c, g, or t
  misc_feature (1401)..(1401): n is a, c, g, or t
  misc_feature (1406)..(1406): n is a, c, g, or t
  misc_feature (1409)..(1409): n is a, c, g, or t
  misc_feature (1414)..(1414): n is a, c, g, or t
  misc_feature (1418)..(1418): n is a, c, g, or t
  misc_feature (1428)..(1428): n is a, c, g, or t
  misc_feature (1430)..(1432): n is a, c, g, or t
  misc_feature (1436)..(1436): n is a, c, g, or t
  misc_feature (1438)..(1438): n is a, c, g, or t
aaantagagagaattaactatgagaggatcgcatcaccattcaccattcacgggatcctatttaggtgacactatagaatcgtcgacccacgcgtccggattatccggagccaaggatccgctcgggtgagtgccctccgctttttgtggccaaacccagccacgcagtcccctccctgcggcgtcctccacacccggggtctgctggtctccgcggatgtcacaggctcggcaaccgccctcctgtcggcggggagtcccgcgacgcccggaaatgctccgaagcctgtcgctcagctgccagatctgcgtctgtgtccggttccgtcactgaggtcgcccctgtccggcccttcctccctagttctcttcaccgtccgcccatcctgtcgcgcgccgcgtcaggtccccattcggcatgtggcttgtcttccatcgtccccaccctcgcccctcttggcccctcagggcagccctgggattcggcagacgccagtcctccctganatgcttccccgtccttccctccgccaggccctacgtctccgcaaaccccacgcttcggggtggccgcctcagacaggaccctgagtccgagactggggtaggggacctgcccgatcctgtaacaaccctcgtgcttctgcacaatcncctcccactagcggtgactgttgggtgtctaccttcccggtgtcccactgagaancgggctcttccttggcaggngcttcttcattgcctcgctgtggatgtcgaggtggggcanganagtgaggagaaaaacagagaggagggaggtaganccaacnagcgagaaaaaggggaaggaanttttaaatgggaagtggatgggtctgaggaatttgaacaaacaccgacagtgaagnagantgacctgaancaagcagtaatggggtaaatggaaatagaacaaaatggggaatcancaaaaatatngnagnaaaaaatacaatgangaaggcttngaaccgtcatnaacaaaaaagggcaaccaaaaancntaattcccaaaattccttaaaatggttttcttnaantcaaaataaatttcccttttaaaattatttnttcaaggttcaacttaanaaggcttnaaaatttttnannnttaantaaaattggaaaaaantttttttttanaaaaggcttttaaaataaantcngggggcncttcnnaaggaaaannaaaatttgntnannttaaaantnnanacntnncncaattcnttnaaaananncnggaanaaaaaanngngnaaaaanttcaaaaaaaaaaaanaaatttttttnaatttttcaaaaaanaaagaancgnanttcnaaaatttttnaaaaanaatgntttaanaaaaattnnaaaaattnaaaaaaaaaggnccctnaanggganaaanaaaaaaaagncnnnaaanana

SEQ ID NO: 420 - DNA, 1427 bp, Homo Sapiens; identical to SEQ ID NO: 276
  misc_feature (1)..(1): n is a, c, g, or t
  misc_feature (816)..(816): n is a, c, g, or t
  misc_feature (824)..(824): n is a, c, g, or t
  misc_feature (832)..(832): n is a, c, g, or t
  misc_feature (838)..(841): n is a, c, g, or t
  misc_feature (843)..(843): n is a, c, g, or t
  misc_feature (846)..(846): n is a, c, g, or t
  misc_feature (853)..(853): n is a, c, g, or t
  misc_feature (857)..(857): n is a, c, g, or t
  misc_feature (859)..(864): n is a, c, g, or t
  misc_feature (866)..(866): n is a, c, g, or t
  misc_feature (868)..(868): n is a, c, g, or t
  misc_feature (873)..(873): n is a, c, g, or t
  misc_feature (877)..(877): n is a, c, g, or t
  misc_feature (879)..(879): n is a, c, g, or t
  misc_feature (882)..(884): n is a, c, g, or t
  misc_feature (886)..(886): n is a, c, g, or t
  misc_feature (890)..(890): n is a, c, g, or t
  misc_feature (892)..(892): n is a, c, g, or t
  misc_feature (899)..(899): n is a, c, g, or t
  misc_feature (901)..(901): n is a, c, g, or t
  misc_feature (903)..(903): n is a, c, g, or t
  misc_feature (905)..(907): n is a, c, g, or t
  misc_feature (909)..(921): n is a, c, g, or t
  misc_feature (925)..(930): n is a, c, g, or t
  misc_feature (933)..(934): n is a, c, g, or t
  misc_feature (936)..(939): n is a, c, g, or t
  misc_feature (941)..(941): n is a, c, g, or t
  misc_feature (943)..(944): n is a, c, g, or t
  misc_feature (946)..(946): n is a, c, g, or t
  misc_feature (949)..(949): n is a, c, g, or t
  misc_feature (951)..(951): n is a, c, g, or t
  misc_feature (953)..(953): n is a, c, g, or t
  misc_feature (955)..(955): n is a, c, g, or t
  misc_feature (957)..(957): n is a, c, g, or t
  misc_feature (962)..(962): n is a, c, g, or t
  misc_feature (964)..(964): n is a, c, g, or t
  misc_feature (975)..(976): n is a, c, g, or t
  misc_feature (978)..(978): n is a, c, g, or t
  misc_feature (980)..(982): n is a, c, g, or t
  misc_feature (985)..(985): n is a, c, g, or t
  misc_feature (990)..(991): n is a, c, g, or t
  misc_feature (995)..(995): n is a, c, g, or t
  misc_feature (997)..(998): n is a, c, g, or t
  misc_feature (1001)..(1001): n is a, c, g, or t
  misc_feature (1005)..(1005): n is a, c, g, or t
  misc_feature (1008)..(1009): n is a, c, g, or t
  misc_feature (1011)..(1011): n is a, c, g, or t
  misc_feature (1013)..(1013): n is a, c, g, or t
  misc_feature (1016)..(1019): n is a, c, g, or t
  misc_feature (1024)..(1024): n is a, c, g, or t
  misc_feature (1028)..(1028): n is a, c, g, or t
  misc_feature (1030)..(1031): n is a, c, g, or t
  misc_feature (1033)..(1033): n is a, c, g, or t
  misc_feature (1035)..(1035): n is a, c, g, or t
  misc_feature (1037)..(1037): n is a, c, g, or t
  misc_feature (1040)..(1041): n is a, c, g, or t
  misc_feature (1044)..(1044): n is a, c, g, or t
  misc_feature (1051)..(1051): n is a, c, g, or t
  misc_feature (1058)..(1060): n is a, c, g, or t
  misc_feature (1063)..(1063): n is a, c, g, or t
  misc_feature (1066)..(1067): n is a, c, g, or t
  misc_feature (1069)..(1069): n is a, c, g, or t
  misc_feature (1071)..(1071): n is a, c, g, or t
  misc_feature (1073)..(1073): n is a, c, g, or t
  misc_feature (1077)..(1078): n is a, c, g, or t
  misc_feature (1080)..(1080): n is a, c, g, or t
  misc_feature (1082)..(1082): n is a, c, g, or t
  misc_feature (1088)..(1090): n is a, c, g, or t
  misc_feature (1092)..(1092): n is a, c, g, or t
  misc_feature (1094)..(1095): n is a, c, g, or t
  misc_feature (1098)..(1099): n is a, c, g, or t
  misc_feature (1101)..(1101): n is a, c, g, or t
  misc_feature (1105)..(1105): n is a, c, g, or t
  misc_feature (1107)..(1108): n is a, c, g, or t
  misc_feature (1112)..(1113): n is a, c, g, or t
  misc_feature (1115)..(1117): n is a, c, g, or t
  misc_feature (1121)..(1121): n is a, c, g, or t
  misc_feature (1124)..(1124): n is a, c, g, or t
  misc_feature (1126)..(1127): n is a, c, g, or t
  misc_feature (1133)..(1133): n is a, c, g, or t
  misc_feature (1139)..(1142): n is a, c, g, or t
  misc_feature (1144)..(1148): n is a, c, g, or t
  misc_feature (1151)..(1151): n is a, c, g, or t
  misc_feature (1156)..(1156): n is a, c, g, or t
  misc_feature (1158)..(1159): n is a, c, g, or t
  misc_feature (1164)..(1165): n is a, c, g, or t
  misc_feature (1171)..(1172): n is a, c, g, or t
  misc_feature (1175)..(1175): n is a, c, g, or t
  misc_feature (1179)..(1179): n is a, c, g, or t
  misc_feature (1181)..(1181): n is a, c, g, or t
  misc_feature (1185)..(1185): n is a, c, g, or t
  misc_feature (1193)..(1197): n is a, c, g, or t
  misc_feature (1199)..(1199): n is a, c, g, or t
  misc_feature (1202)..(1202): n is a, c, g, or t
  misc_feature (1204)..(1206): n is a, c, g, or t
  misc_feature (1208)..(1209): n is a, c, g, or t
  misc_feature (1211)..(1211): n is a, c, g, or t
  misc_feature (1213)..(1216): n is a, c, g, or t
  misc_feature (1218)..(1218): n is a, c, g, or t
  misc_feature (1220)..(1221): n is a, c, g, or t
  misc_feature (1223)..(1223): n is a, c, g, or t
  misc_feature (1225)..(1225): n is a, c, g, or t
  misc_feature (1228)..(1228): n is a, c, g, or t
  misc_feature (1233)..(1233): n is a, c, g, or t
  misc_feature (1235)..(1235): n is a, c, g, or t
  misc_feature (1238)..(1239): n is a, c, g, or t
  misc_feature (1243)..(1243): n is a, c, g, or t
  misc_feature (1249)..(1250): n is a, c, g, or t
  misc_feature (1252)..(1253): n is a, c, g, or t
  misc_feature (1255)..(1255): n is a, c, g, or t
  misc_feature (1258)..(1258): n is a, c, g, or t
  misc_feature (1261)..(1261): n is a, c, g, or t
  misc_feature (1263)..(1265): n is a, c, g, or t
  misc_feature (1268)..(1268): n is a, c, g, or t
  misc_feature (1270)..(1272): n is a, c, g, or t
  misc_feature (1275)..(1275): n is a, c, g, or t
  misc_feature (1283)..(1283): n is a, c, g, or t
  misc_feature (1285)..(1285): n is a, c, g, or t
  misc_feature (1290)..(1290): n is a, c, g, or t
  misc_feature (1294)..(1294): n is a, c, g, or t
  misc_feature (1298)..(1298): n is a, c, g, or t
  misc_feature (1300)..(1300): n is a, c, g, or t
  misc_feature (1302)..(1302): n is a, c, g, or t
  misc_feature (1304)..(1305): n is a, c, g, or t
  misc_feature (1307)..(1308): n is a, c, g, or t
  misc_feature (1311)..(1311): n is a, c, g, or t
  misc_feature (1320)..(1322): n is a, c, g, or t
  misc_feature (1326)..(1327): n is a, c, g, or t
  misc_feature (1329)..(1329): n is a, c, g, or t
  misc_feature (1331)..(1331): n is a, c, g, or t
  misc_feature (1333)..(1334): n is a, c, g, or t
  misc_feature (1336)..(1338): n is a, c, g, or t
  misc_feature (1340)..(1340): n is a, c, g, or t
  misc_feature (1343)..(1343): n is a, c, g, or t
  misc_feature (1346)..(1346): n is a, c, g, or t
  misc_feature (1348)..(1349): n is a, c, g, or t
  misc_feature (1351)..(1351): n is a, c, g, or t
  misc_feature (1355)..(1355): n is a, c, g, or t
  misc_feature (1357)..(1357): n is a, c, g, or t
  misc_feature (1360)..(1361): n is a, c, g, or t
  misc_feature (1366)..(1366): n is a, c, g, or t
  misc_feature (1368)..(1370): n is a, c, g, or t
  misc_feature (1372)..(1375): n is a, c, g, or t
  misc_feature (1377)..(1378): n is a, c, g, or t
  misc_feature (1382)..(1384): n is a, c, g, or t
  misc_feature (1387)..(1387): n is a, c, g, or t
  misc_feature (1390)..(1390): n is a, c, g, or t
  misc_feature (1393)..(1393): n is a, c, g, or t
  misc_feature (1397)..(1398): n is a, c, g, or t
  misc_feature (1400)..(1400): n is a, c, g, or t
  misc_feature (1402)..(1403): n is a, c, g, or t
  misc_feature (1405)..(1405): n is a, c, g, or t
  misc_feature (1407)..(1407): n is a, c, g, or t
  misc_feature (1410)..(1410): n is a, c, g, or t
  misc_feature (1412)..(1412): n is a, c, g, or t
  misc_feature (1420)..(1421): n is a, c, g, or t
  misc_feature (1423)..(1423): n is a, c, g, or t
  misc_feature (1427)..(1427): n is a, c, g, or t

SEQ ID NO: 421 - DNA, 1417 bp, Homo Sapiens; identical to SEQ ID NO: 245
  misc_feature (728)..(729): n is a, c, g, or t
  misc_feature (738)..(739): n is a, c, g, or t
  misc_feature (743)..(748): n is a, c, g, or t
  misc_feature (750)..(791): n is a, c, g, or t
  misc_feature (811)..(811): n is a, c, g, or t
  misc_feature (838)..(838): n is a, c, g, or t
  misc_feature (855)..(855): n is a, c, g, or t
  misc_feature (857)..(857): n is a, c, g, or t
  misc_feature (864)..(864): n is a, c, g, or t
  misc_feature (912)..(912): n is a, c, g, or t
  misc_feature (931)..(931): n is a, c, g, or t
  misc_feature (953)..(953): n is a, c, g, or t
  misc_feature (963)..(963): n is a, c, g, or t
  misc_feature (969)..(969): n is a, c, g, or t
  misc_feature (975)..(975): n is a, c, g, or t
  misc_feature (978)..(978): n is a, c, g, or t
  misc_feature (989)..(989): n is a, c, g, or t
  misc_feature (1006)..(1006): n is a, c, g, or t
  misc_feature (1032)..(1032): n is a, c, g, or t
  misc_feature (1035)..(1037): n is a, c, g, or t
  misc_feature (1040)..(1041): n is a, c, g, or t
  misc_feature (1050)..(1050): n is a, c, g, or t
  misc_feature (1060)..(1061): n is a, c, g, or t
  misc_feature (1067)..(1068): n is a, c, g, or t
  misc_feature (1076)..(1076): n is a, c, g, or t
  misc_feature (1079)..(1079): n is a, c, g, or t
  misc_feature (1092)..(1092): n is a, c, g, or t
  misc_feature (1101)..(1102): n is a, c, g, or t
  misc_feature (1108)..(1108): n is a, c, g, or t
  misc_feature (1117)..(1117): n is a, c, g, or t
  misc_feature (1125)..(1125): n is a, c, g, or t
  misc_feature (1132)..(1133): n is a, c, g, or t
  misc_feature (1143)..(1143): n is a, c, g, or t
  misc_feature (1146)..(1146): n is a, c, g, or t
  misc_feature (1149)..(1150): n is a, c, g, or t
  misc_feature (1152)..(1152): n is a, c, g, or t
  misc_feature (1158)..(1158): n is a, c, g, or t
  misc_feature (1160)..(1160): n is a, c, g, or t
  misc_feature (1163)..(1163): n is a, c, g, or t
  misc_feature (1168)..(1169): n is a, c, g, or t
  misc_feature (1185)..(1185): n is a, c, g, or t
  misc_feature (1187)..(1187): n is a, c, g, or t
  misc_feature (1191)..(1191): n is a, c, g, or t
  misc_feature (1194)..(1194): n is a, c, g, or t
  misc_feature (1196)..(1197): n is a, c, g, or t
  misc_feature (1204)..(1204): n is a, c, g, or t
  misc_feature (1211)..(1211): n is a, c, g, or t
  misc_feature (1216)..(1216): n is a, c, g, or t
  misc_feature (1219)..(1219): n is a, c, g, or t
  misc_feature (1229)..(1229): n is a, c, g, or t
  misc_feature (1231)..(1231): n is a, c, g, or t
  misc_feature (1243)..(1243): n is a, c, g, or t
  misc_feature (1247)..(1248): n is a, c, g, or t
  misc_feature (1262)..(1262): n is a, c, g, or t
  misc_feature (1268)..(1268): n is a, c, g, or t
  misc_feature (1286)..(1286): n is a, c, g, or t
  misc_feature (1301)..(1301): n is a, c, g, or t
  misc_feature (1319)..(1319): n is a, c, g, or t
  misc_feature (1327)..(1327): n is a, c, g, or t
  misc_feature (1349)..(1349): n is a, c, g, or t
  misc_feature (1357)..(1357): n is a, c, g, or t
  misc_feature (1361)..(1362): n is a, c, g, or t
  misc_feature (1371)..(1371): n is a, c, g, or t
  misc_feature (1379)..(1379): n is a, c, g, or t
  misc_feature (1384)..(1384): n is a, c, g, or t
  misc_feature (1387)..(1387): n is a, c, g, or t
  misc_feature (1395)..(1395): n is a, c, g, or t
  misc_feature (1397)..(1397): n is a, c, g, or t
  misc_feature (1399)..(1400): n is a, c, g, or t
  misc_feature (1402)..(1402): n is a, c, g, or t
  misc_feature (1406)..(1406): n is a, c, g, or t
  misc_feature (1415)..(1415): n is a, c, g, or t
  misc_feature (1417)..(1417): n is a, c, g, or t

SEQ ID NO: 422 - DNA, 1414 bp, Homo Sapiens
  misc_feature (1)..(1): n is a, c, g, or t
  misc_feature (859)..(859): n is a, c, g, or t
  misc_feature (932)..(932): n is a, c, g, or t
  misc_feature (935)..(935): n is a, c, g, or t
  misc_feature (962)..(962): n is a, c, g, or t
  misc_feature (964)..(964): n is a, c, g, or t
  misc_feature (967)..(967): n is a, c, g, or t
  misc_feature (969)..(969): n is a, c, g, or t
  misc_feature (973)..(973): n is a, c, g, or t
  misc_feature (993)..(993): n is a, c, g, or t
  misc_feature (1003)..(1003): n is a, c, g, or t
  misc_feature (1009)..(1009): n is a, c, g, or t
  misc_feature (1012)..(1012): n is a, c, g, or t
  misc_feature (1035)..(1035): n is a, c, g, or t
  misc_feature (1041)..(1041): n is a, c, g, or t
  misc_feature (1045)..(1045): n is a, c, g, or t
  misc_feature (1055)..(1055): n is a, c, g, or t
  misc_feature (1095)..(1095): n is a, c, g, or t
  misc_feature (1105)..(1105): n is a, c, g, or t
  misc_feature (1116)..(1116): n is a, c, g, or t
  misc_feature (1123)..(1123): n is a, c, g, or t
  misc_feature (1128)..(1129): n is a, c, g, or t
  misc_feature (1139)..(1139): n is a, c, g, or t
  misc_feature (1150)..(1150): n is a, c, g, or t
  misc_feature (1152)..(1152): n is a, c, g, or t
  misc_feature (1167)..(1167): n is a, c, g, or t
  misc_feature (1171)..(1172): n is a, c, g, or t
  misc_feature (1174)..(1174): n is a, c, g, or t
  misc_feature (1177)..(1177): n is a, c, g, or t
  misc_feature (1179)..(1179): n is a, c, g, or t
  misc_feature (1191)..(1191): n is a, c, g, or t
  misc_feature (1193)..(1193): n is a, c, g, or t
  misc_feature (1198)..(1198): n is a, c, g, or t
  misc_feature (1207)..(1207): n is a, c, g, or t
  misc_feature (1215)..(1215): n is a, c, g, or t
  misc_feature (1236)..(1236): n is a, c, g, or t
  misc_feature (1243)..(1243): n is a, c, g, or t
  misc_feature (1246)..(1246): n is a, c, g, or t
  misc_feature (1248)..(1249): n is a, c, g, or t
  misc_feature (1254)..(1254): n is a, c, g, or t
  misc_feature (1256)..(1256): n is a, c, g, or t
  misc_feature (1268)..(1268): n is a, c, g, or t
  misc_feature (1276)..(1276): n is a, c, g, or t
  misc_feature (1278)..(1278): n is a, c, g, or t
  misc_feature (1283)..(1283): n is a, c, g, or t
  misc_feature (1285)..(1286): n is a, c, g, or t
  misc_feature (1294)..(1294): n is a, c, g, or t
  misc_feature (1299)..(1299): n is a, c, g, or t
  misc_feature (1301)..(1301): n is a, c, g, or t
  misc_feature (1303)..(1303): n is a, c, g, or t
  misc_feature (1313)..(1313): n is a, c, g, or t
  misc_feature (1325)..(1325): n is a, c, g, or t
  misc_feature (1330)..(1330): n is a, c, g, or t
  misc_feature (1337)..(1337): n is a, c, g, or t
  misc_feature (1352)..(1352): n is a, c, g, or t
  misc_feature (1365)..(1365): n is a, c, g, or t
  misc_feature (1373)..(1374): n is a, c, g, or t
  misc_feature (1376)..(1376): n is a, c, g, or t
  misc_feature (1378)..(1380): n is a, c, g, or t
  misc_feature (1383)..(1383): n is a, c, g, or t
  misc_feature (1390)..(1392): n is a, c, g, or t
  misc_feature (1404)..(1404): n is a, c, g, or t
nttagagaaattactatgagaggatcgcatcaccatcaccatcacggatcctatttaggtgacactatagaatcgtcgacccacgcgtccgccagcccccgcgcccgcccgccagcccgcccagcggtcgggtccgggcgcccgcgcagaatcagctgtctgagctgcccaggcggcgggggagcagcgagcgggcttcagcgagccgcaggaggcacaggcctgtcctgggtccccgcaggtctgcgcgtctgttgttcccagcgctctgagaggcctgaaaaggaagagcaacctgtccagaatccccgcaggaaaggaaaaggaggggaaatctcgacatggaaaaactcttcaatgaaaatgaaggaatgccttcgaatcaaggaaagatagacaatgaagaacagccaccgcacgagggaaagccagaagtagcttgtattctggaagacaagaagttagaaaacgagggaaacacagaaaacacgggcaagagagttgaggaaccgttaaaggataaagaaaagccagagagtgcgggaaaggcaaaaggagaaggaaagtcagagaggaagggaaagtcagagatgcagggaggatcaaagacagagggaaagccagagagagggggaagggcagagggtgaaggagagccagacagtgaaagagagccagagagtgagggagagccagaaagtgaaacaagggctgcaggaaagcgcccagctgaggatgatatacccaggaaagccaaaagaaaaaccaacaaggggctggctcagtacctcaagcaatataaggaagccatacatgatatgaatttcagcaatgaggacatgataagagaatttgacancatggctagggtggaggataaaaaggagaaaaagcaaacagaaattgggggcgtttttgtggatgcaaaaaanttncaggaccccttctatcctaggggttcnanggnanttcngggtggctgcagggcccccncgaagggacnctgaanacnttccttatgtgtagtgtccctgncaggcntttntcaggccatntgttttaaccttatggaaatactttgctttaaccgttccncctgctaccnaaaacgttttnacccccntgccnntgtttgcttnctctttttttncntaacaaatttttccncttnncnttncnaaaacctctttntnttggnaaaaataancccctttnatttcaaaaaaaaaaaagggnggccccnccntnnggggncnaataactttttncctgactngnccctntnnaaaatccnaaggncncnaaccctttgnttttttcaaccncgttncccgggntttttttttggaaanccccttttggganttttggcnngngnnnttnggaaaannnggttcccctttntcccggccta

SEQ ID NO: 423 - DNA, 1379 bp, Homo Sapiens
  misc_feature (912)..(912): n is a, c, g, or t
  misc_feature (961)..(961): n is a, c, g, or t
  misc_feature (966)..(967): n is a, c, g, or t
  misc_feature (972)..(973): n is a, c, g, or t
  misc_feature (990)..(990): n is a, c, g, or t
  misc_feature (1003)..(1003): n is a, c, g, or t
  misc_feature (1008)..(1008): n is a, c, g, or t
  misc_feature (1013)..(1013): n is a, c, g, or t
  misc_feature (1019)..(1019): n is a, c, g, or t
  misc_feature (1022)..(1022): n is a, c, g, or t
  misc_feature (1035)..(1035): n is a, c, g, or t
  misc_feature (1037)..(1037): n is a, c, g, or t
  misc_feature (1040)..(1040): n is a, c, g, or t
  misc_feature (1048)..(1048): n is a, c, g, or t
  misc_feature (1053)..(1053): n is a, c, g, or t
  misc_feature (1070)..(1070): n is a, c, g, or t
  misc_feature (1072)..(1072): n is a, c, g, or t
  misc_feature (1078)..(1078): n is a, c, g, or t
  misc_feature (1090)..(1090): n is a, c, g, or t
  misc_feature (1096)..(1096): n is a, c, g, or t
  misc_feature (1102)..(1102): n is a, c, g, or t
  misc_feature (1106)..(1106): n is a, c, g, or t
  misc_feature (1112)..(1112): n is a, c, g, or t
  misc_feature (1129)..(1129): n is a, c, g, or t
  misc_feature (1132)..(1132): n is a, c, g, or t
  misc_feature (1134)..(1134): n is a, c, g, or t
  misc_feature (1138)..(1138): n is a, c, g, or t
  misc_feature (1142)..(1143): n is a, c, g, or t
  misc_feature (1157)..(1157): n is a, c, g, or t
  misc_feature (1159)..(1159): n is a, c, g, or t
  misc_feature (1164)..(1164): n is a, c, g, or t
  misc_feature (1175)..(1175): n is a, c, g, or t
  misc_feature (1177)..(1178): n is a, c, g, or t
  misc_feature (1183)..(1183): n is a, c, g, or t
  misc_feature (1186)..(1186): n is a, c, g, or t
  misc_feature (1197)..(1197): n is a, c, g, or t
  misc_feature (1204)..(1204): n is a, c, g, or t
  misc_feature (1209)..(1209): n is a, c, g, or t
  misc_feature (1218)..(1218): n is a, c, g, or t
  misc_feature (1267)..(1267): n is a, c, g, or t
  misc_feature (1273)..(1273): n is a, c, g, or t
  misc_feature (1275)..(1276): n is a, c, g, or t
  misc_feature (1278)..(1278): n is a, c, g, or t
  misc_feature (1281)..(1281): n is a, c, g, or t
  misc_feature (1291)..(1291): n is a, c, g, or t
  misc_feature (1298)..(1300): n is a, c, g, or t
  misc_feature (1310)..(1310): n is a, c, g, or t
  misc_feature (1314)..(1314): n is a, c, g, or t
  misc_feature (1318)..(1318): n is a, c, g, or t
  misc_feature (1334)..(1334): n is a, c, g, or t
  misc_feature (1343)..(1343): n is a, c, g, or t
  misc_feature (1345)..(1345): n is a, c, g, or t
  misc_feature (1365)..(1366): n is a, c, g, or t
  misc_feature (1371)..(1371): n is a, c, g, or t
  misc_feature (1376)..(1376): n is a, c, g, or t
  misc_feature (1378)..(1378): n is a, c, g, or t
tagagaaattactatgagaggatcgcatcaccatcaccatcacggatcctatttaggtgacactatagaatcgtcgacccacgcgtccggtttaaagatggcggcggaggaacctcagcagcagaagcaggagccgctgggcagcgactccgaaggtgttaactgtctggcctatgatgaagccatcatggctcagcaggaccgaattcagcaagagattgctgtgcagaaccctctggtgtcagagcggctggagctctcggtcctatacaaggagtatgctgaagatgacaacatctatcaacagaagatcaaggacctccacaaaaagtactcgtacatccgcaagaccaggcctgacggcaactgtttctatcgggctttcggattctcccacttggaggcactgctggatgacagcaaggagttgcagcggtgagaagggtgggcactgggcaccgaggcaggtgggtgtctacctcctccccgggcgagtaggatgtgtctcgagtagggtgtctccctccttcccgggcgatgggctggactctggccttgccaggcggggcagtgctgtctcggccctggcgtctgggctggtcgaggagcccatgctgggcccgcctttccatcccacccccaggttcaaggctgtgtctgccaagagcaaggaagacctggtgtcccagggcttcactgaattcacaattgaggatttccacaacacgttcatggacctgattgagcaggtggagaagcagacctctgtcgccgacctgctggcctccttcaatgaccagagcacctccgactaccttgtggtctacctgcggctgctcacctcgggctacctgcagcgcgagagcaagttcttcgagcacttcatcgagggtggacggactgtcaaggaanttctgcccaacaggaaggtggaacccatgtgcaaggaaaagcgaaccanatccnncatcnnttgcgctgggcccaggncccttcaaccgtntccantccanggtggnaanaaaattggacccncnggngaaggggnggcanccaccaatcccgcaaantntttccntgaaggcttccnaacccnaagggnctanctttcnttaccgggcctgggaanctnanaaanttcnnctaaaaataggggntnggttncaaccccttgntnnccctnggngcccccctttngcaaggnccttnaaatttaanaaaaggttttttttggggtttaaaaagggcccaaatttccccccttttntcctgntnnanaancccccccccntgttttnnnaaaagggggnccgngggnaacccggggggggttnccttttttngncccccggggttttttttttnnccccnccccnang

SEQ ID NO: 424 - DNA, 1339 bp, Homo Sapiens
  misc_feature (950)..(950): n is a, c, g, or t
  misc_feature (997)..(997): n is a, c, g, or t
  misc_feature (1018)..(1018): n is a, c, g, or t
  misc_feature (1037)..(1037): n is a, c, g, or t
  misc_feature (1041)..(1041): n is a, c, g, or t
  misc_feature (1043)..(1043): n is a, c, g, or t
  misc_feature (1078)..(1079): n is a, c, g, or t
  misc_feature (1085)..(1085): n is a, c, g, or t
  misc_feature (1088)..(1088): n is a, c, g, or t
  misc_feature (1090)..(1090): n is a, c, g, or t
  misc_feature (1097)..(1097): n is a, c, g, or t
  misc_feature (1099)..(1099): n is a, c, g, or t
  misc_feature (1102)..(1102): n is a, c, g, or t
  misc_feature (1112)..(1112): n is a, c, g, or t
  misc_feature (1114)..(1115): n is a, c, g, or t
  misc_feature (1118)..(1119): n is a, c, g, or t
  misc_feature (1121)..(1121): n is a, c, g, or t
  misc_feature (1125)..(1127): n is a, c, g, or t
  misc_feature (1131)..(1135): n is a, c, g, or t
  misc_feature (1138)..(1139): n is a, c, g, or t
  misc_feature (1142)..(1142): n is a, c, g, or t
  misc_feature (1144)..(1144): n is a, c, g, or t
  misc_feature (1148)..(1150): n is a, c, g, or t
  misc_feature (1156)..(1156): n is a, c, g, or t
  misc_feature (1161)..(1161): n is a, c, g, or t
  misc_feature (1168)..(1169): n is a, c, g, or t
  misc_feature (1176)..(1176): n is a, c, g, or t
  misc_feature (1178)..(1178): n is a, c, g, or t
  misc_feature (1180)..(1182): n is a, c, g, or t
  misc_feature (1188)..(1189): n is a, c, g, or t
  misc_feature (1197)..(1197): n is a, c, g, or t
  misc_feature (1207)..(1208): n is a, c, g, or t
  misc_feature (1212)..(1213): n is a, c, g, or t
  misc_feature (1216)..(1216): n is a, c, g, or t
  misc_feature (1218)..(1224): n is a, c, g, or t
  misc_feature (1227)..(1227): n is a, c, g, or t
  misc_feature (1229)..(1233): n is a, c, g, or t
  misc_feature (1236)..(1240): n is a, c, g, or t
  misc_feature (1243)..(1246): n is a, c, g, or t
  misc_feature (1256)..(1256): n is a, c, g, or t
  misc_feature (1258)..(1260): n is a, c, g, or t
  misc_feature (1263)..(1263): n is a, c, g, or t
  misc_feature (1266)..(1273): n is a, c, g, or t
  misc_feature (1277)..(1282): n is a, c, g, or t
  misc_feature (1285)..(1285): n is a, c, g, or t
  misc_feature (1289)..(1296): n is a, c, g, or t
  misc_feature (1299)..(1305): n is a, c, g, or t
  misc_feature (1310)..(1312): n is a, c, g, or t
  misc_feature (1319)..(1330): n is a, c, g, or t
  misc_feature (1339)..(1339): n is a, c, g, or t
agagaattactatgagaggatcgcatcaccatcaccatcacggatcctatttaggtgacactatagaatcgtcgacccacgcgtccgaggagatccagcaccacctgaagaaactggagggccgccgcctggactttgactacaagaagaagcggcagggcaagatccccgatgaggagctacgccaggcgctggagaagttcgaggagtccaaggaggtggcagaaaccagcatgcacaacctcctggagactgacatcgagcaggtgagtcagctctcggccctggtggatgcacagctggactaccaccggcaggccgtgcagatcctggacgagctggcggagaagctcaagcgcaggatgcgggaagcttcctcacgccctaagcgggagtataagcccaagccccgggagccctttgaccttggagagcctgagcagtccaacgggggcttcccctgcaccacagcccccaagatcgcagcttcatcgtctttccgatcttccgacaagcccatccggacccctagccggagcatgccgcccctggaccagccgagctgcaaggcgctgtacgacttcgagcccgagaacgacggggagctgggcttccatgagggcgacgtcatcacgctgaccaaccagatcgatgagaactggtacgagggcatgctggacagccagtcgggcttcttcccgctcagctacgtggaggtgcttgtgcccctgccgcagtgactcacccgtgtccccgccccgcccctccgtccacactggccggcaccccctgctgggtctcctgcattccacggagcccctgctgccagggcggtgtctgagcctgccggcgccacctgggccccggcccttgaggtactccctgagcaggacccacacttggggtgggggggcttatctggggtgggtggggatgcctgtttacactancgctgactccaacggtgacggctcctttccccattcatggggcagcntcttccccgttcccaattttngccagttgggcgagggggnaaanantaaggtgctcttaaaaaactaatgttctttggggnncccccnctncntttgaancnaangggggccggncnntgnntncctnnntccnnnnnttnnaanangggnnnaagggnccccnggggggnnaaaaaanancnnnttttanncccccccngggggggggnngggnnggncnnnnnnnggnannnnnccnnnnnaannnntttttttttngnnnggnaannnnnnnncccnnnnnnttntttnnnnnnnnaannnnnnnttttnnnaaaaaannnnnnnnnnnnccccccccn

SEQ ID NO: 425 - DNA, 1390 bp, Homo Sapiens
  misc_feature (846)..(846): n is a, c, g, or t
  misc_feature (873)..(873): n is a, c, g, or t
  misc_feature (898)..(898): n is a, c, g, or t
  misc_feature (955)..(955): n is a, c, g, or t
  misc_feature (958)..(958): n is a, c, g, or t
  misc_feature (968)..(968): n is a, c, g, or t
  misc_feature (978)..(978): n is a, c, g, or t
  misc_feature (993)..(993): n is a, c, g, or t
  misc_feature (1011)..(1011): n is a, c, g, or t
  misc_feature (1013)..(1013): n is a, c, g, or t
  misc_feature (1022)..(1022): n is a, c, g, or t
  misc_feature (1035)..(1035): n is a, c, g, or t
  misc_feature (1038)..(1038): n is a, c, g, or t
  misc_feature (1050)..(1050): n is a, c, g, or t
  misc_feature (1052)..(1052): n is a, c, g, or t
  misc_feature (1070)..(1070): n is a, c, g, or t
  misc_feature (1079)..(1080): n is a, c, g, or t
  misc_feature (1084)..(1084): n is a, c, g, or t
  misc_feature (1093)..(1093): n is a, c, g, or t
  misc_feature (1113)..(1113): n is a, c, g, or t
  misc_feature (1116)..(1118): n is a, c, g, or t
  misc_feature (1121)..(1121): n is a, c, g, or t
  misc_feature (1125)..(1125): n is a, c, g, or t
  misc_feature (1127)..(1127): n is a, c, g, or t
  misc_feature (1140)..(1140): n is a, c, g, or t
  misc_feature (1145)..(1145): n is a, c, g, or t
  misc_feature (1151)..(1151): n is a, c, g, or t
  misc_feature (1157)..(1157): n is a, c, g, or t
  misc_feature (1169)..(1169): n is a, c, g, or t
  misc_feature (1181)..(1181): n is a, c, g, or t
  misc_feature (1185)..(1186): n is a, c, g, or t
  misc_feature (1192)..(1192): n is a, c, g, or t
  misc_feature (1199)..(1199): n is a, c, g, or t
  misc_feature (1215)..(1215): n is a, c, g, or t
  misc_feature (1220)..(1220): n is a, c, g, or t
  misc_feature (1223)..(1223): n is a, c, g, or t
  misc_feature (1225)..(1225): n is a, c, g, or t
  misc_feature (1227)..(1229): n is a, c, g, or t
  misc_feature (1235)..(1235): n is a, c, g, or t
  misc_feature (1237)..(1237): n is a, c, g, or t
  misc_feature (1239)..(1239): n is a, c, g, or t
  misc_feature (1248)..(1248): n is a, c, g, or t
  misc_feature (1273)..(1273): n is a, c, g, or t
  misc_feature (1280)..(1280): n is a, c, g, or t
  misc_feature (1290)..(1290): n is a, c, g, or t
  misc_feature (1293)..(1293): n is a, c, g, or t
  misc_feature (1296)..(1297): n is a, c, g, or t
  misc_feature (1300)..(1300): n is a, c, g, or t
  misc_feature (1316)..(1316): n is a, c, g, or t
  misc_feature (1328)..(1328): n is a, c, g, or t
  misc_feature (1346)..(1347): n is a, c, g, or t
  misc_feature (1355)..(1355): n is a, c, g, or t
  misc_feature (1357)..(1357): n is a, c, g, or t
  misc_feature (1364)..(1364): n is a, c, g, or t
  misc_feature (1368)..(1371): n is a, c, g, or t
  misc_feature (1376)..(1376): n is a, c, g, or t
  misc_feature (1382)..(1382): n is a, c, g, or t
tagagaaattactatgagaggatcgcatcaccatcaccatcacggatcctatttaggtgacactatagaatcgtcgacccacgcgtccggtgctggaggggtgcttgcaggagcattgtgtaattctaatccagagctggtgagagcggtgactttggaggcacctttcttggatgttctcaacaccatgatggacactacacttcctctgacattagaagaattagaagaatgggggaatccttcatctgatgaaaaacacaagaactacataaaacgttactgtccctatcaaaatattaaacctcagcattatccttcaattcacataacggcatatgaaaacgatgaacgggtacctctgaaaggaattgtaagttatactgagaaactcaaggaagccatcgcggagcatgctaaggacacaggtgaaggctatcagacccctaatattattctagatattcagcctggaggcaatcatgtaattgaggattctcacaaaaagattacagcccaaattaaattcctgtacgaggaacttggacttgacagcaccagtgttttcgaggatcttaagaaatacctgaaattctgaaacactgcattcaactgggaattggaaacacactgaaatatttcatagtcttacttccaattgagttagcaaaaaaaaattaataacttgagacttttaagttattaattttttaaaatgtgcttctccatctaaattttgcttagtctacatctcacttgcttatactattctctccattgatgcacatgcccattaacctaggaaagtagttttcaaatcatgctccttagaaggatgtggagtanagggaagggaaggattggtgatagcanagctccaggcctcccttccagtcanaacagttgagcagtttacaaattagtgtcctgcctctttgctagcaaatgcttttanacnctgtggcagngagtcatccnctaatttctatgacngcattttaaggggaaaananaaaattctnccccttaaaatcngtnaagtttttgaananctgggggcccaaaggggntccgggccnncccngatggagcnatcggaaaaaagttaaagcnccnnnaanccananttacttttaaacnttttntttttncaaacntttgaaaccttnttaagcggttcntccnnctccanaaaatcnaaaaattttgtttgtncccanccncngnnngaaagnancnttaaaaagntaaacccccggaaggccggtctccncctccangggccccccnggnaanntgntccccccggaaaaggnccttgaaaaacncctcccaaggttggggannaaatctgngntaaaaancccnnnnaaaancttatnttttttgg

SEQ ID NO: 426 - DNA, 1157 bp, Homo Sapiens
ttccttttaaggaggagaattaactatgagaggtcgcatcaccatcaccatcacggatcctatttaggtgacactatagaatcgtcgacccacgcgtccgagcgtctagatcatttgcagcgggctcgagaacactttataaactacttaactcagtgccattgctatcatgtggcagagtttgagctgcccaaaaccatgaacaactctgctgaaaatcacactgccaattcctccatggcttatcctagtctcgttgctatggcatctcaaagacaggctaaaatacagagatacaagcagaagaaggagttggagcataggttgtctgcaatgaaatctgctgtggaaagtggtcaagcagatgatgagcgtgttcgtgaatattatcttcttcaccttcagaggtggattgatatcagcttagaagagattgagagcattgaccaggaaataaagatcctgagagaaagagactcttcaagagaggcatcaacttctaactcatctcgccaggagaggcctccagtgaaacccttcattctcactcggaacatggctcaagccaaagtatttggagctggttatccaagtctgccaactatgacggtgagtgactggtatgagcaacatcggaaatatggagcattaccggatcagggaatagccaaggcagcaccagaggaattcagaaaagcagctcagcaacaggaagaacaagaagaaaaggaggaagaggatgatgaacaaacactccacagagcccgggagtgggatgactggaaggacacccatcctaggggctatgggaaccgacagaacatgggctgatcttcccacaacaccacaggactgcagggtgcacaactcccctgccaaggaaaaccatgcagtcctcccctccctggtctcctgcttcagctctgtacaacgagggcaaagatgctaaatcttgctttgcattcagtaaagtgtcaagtgattaagtgtgtatttgtacctagatgatatgaaccagcagtcttgttttggcatcatcctcatcatgttgtattcagcttcttaagtgaagaaaggtgctgagaaatgctctgtataatctatggctattcgattctctgaaaaaataataaaagtccccccctattatatgaagc

SEQ ID NO: 427 - DNA, 1354 bp, Homo Sapiens
  misc_feature (909)..(909): n is a, c, g, or t
  misc_feature (949)..(949): n is a, c, g, or t
  misc_feature (952)..(952): n is a, c, g, or t
  misc_feature (961)..(961): n is a, c, g, or t
  misc_feature (991)..(991): n is a, c, g, or t
  misc_feature (1006)..(1006): n is a, c, g, or t
  misc_feature (1013)..(1013): n is a, c, g, or t
  misc_feature (1016)..(1016): n is a, c, g, or t
  misc_feature (1018)..(1018): n is a, c, g, or t
  misc_feature (1021)..(1021): n is a, c, g, or t
  misc_feature (1028)..(1028): n is a, c, g, or t
  misc_feature (1037)..(1037): n is a, c, g, or t
  misc_feature (1048)..(1049): n is a, c, g, or t
  misc_feature (1055)..(1055): n is a, c, g, or t
  misc_feature (1057)..(1057): n is a, c, g, or t
  misc_feature (1061)..(1061): n is a, c, g, or t
  misc_feature (1069)..(1069): n is a, c, g, or t
  misc_feature (1080)..(1080): n is a, c, g, or t
  misc_feature (1083)..(1083): n is a, c, g, or t
  misc_feature (1089)..(1089): n is a, c, g, or t
  misc_feature (1100)..(1100): n is a, c, g, or t
  misc_feature (1102)..(1102): n is a, c, g, or t
  misc_feature (1109)..(1109): n is a, c, g, or t
  misc_feature (1113)..(1113): n is a, c, g, or t
  misc_feature (1115)..(1115): n is a, c, g, or t
  misc_feature (1118)..(1119): n is a, c, g, or t
  misc_feature (1124)..(1124): n is a, c, g, or t
  misc_feature (1128)..(1128): n is a, c, g, or t
  misc_feature (1130)..(1130): n is a, c, g, or t
  misc_feature (1135)..(1135): n is a, c, g, or t
  misc_feature (1138)..(1139): n is a, c, g, or t
  misc_feature (1144)..(1144): n is a, c, g, or t
  misc_feature (1156)..(1156): n is a, c, g, or t
  misc_feature (1160)..(1160): n is a, c, g, or t
  misc_feature (1164)..(1164): n is a, c, g, or t
  misc_feature (1168)..(1169): n is a, c, g, or t
  misc_feature (1173)..(1174): n is a, c, g, or t
  misc_feature (1182)..(1182): n is a, c, g, or t
  misc_feature (1187)..(1187): n is a, c, g, or t
  misc_feature (1189)..(1190): n is a, c, g, or t
  misc_feature (1194)..(1195): n is a, c, g, or t
  misc_feature (1199)..(1199): n is a, c, g, or t
  misc_feature (1201)..(1202): n is a, c, g, or t
  misc_feature (1204)..(1204): n is a, c, g, or t
  misc_feature (1210)..(1210): n is a, c, g, or t
  misc_feature (1213)..(1213): n is a, c, g, or t
  misc_feature (1218)..(1219): n is a, c, g, or t
  misc_feature (1221)..(1221): n is a, c, g, or t
  misc_feature (1223)..(1223): n is a, c, g, or t
  misc_feature (1227)..(1227): n is a, c, g, or t
  misc_feature (1237)..(1237): n is a, c, g, or t
  misc_feature (1243)..(1244): n is a, c, g, or t
  misc_feature (1246)..(1249): n is a, c, g, or t
  misc_feature (1252)..(1252): n is a, c, g, or t
  misc_feature (1257)..(1257): n is a, c, g, or t
  misc_feature (1265)..(1266): n is a, c, g, or t
  misc_feature (1270)..(1270): n is a, c, g, or t
  misc_feature (1276)..(1276): n is a, c, g, or t
  misc_feature (1283)..(1283): n is a, c, g, or t
  misc_feature (1286)..(1286): n is a, c, g, or t
  misc_feature (1289)..(1289): n is a, c, g, or t
  misc_feature (1291)..(1291): n is a, c, g, or t
  misc_feature (1296)..(1297): n is a, c, g, or t
  misc_feature (1300)..(1301): n is a, c, g, or t
  misc_feature (1305)..(1305): n is a, c, g, or t
  misc_feature (1313)..(1313): n is a, c, g, or t
  misc_feature (1315)..(1318): n is a, c, g, or t
  misc_feature (1320)..(1320): n is a, c, g, or t
  misc_feature (1322)..(1323): n is a, c, g, or t
  misc_feature (1328)..(1329): n is a, c, g, or t
  misc_feature (1335)..(1341): n is a, c, g, or t
  misc_feature (1354)..(1354): n is a, c, g, or t
tagagaaattactatgagaggatcgcatcaccatcaccatcacggatcctatttaggtgacactatagaatcgtcgacccacgcgtccgccaggacgcacgggcatggggaccccggggagccagatggcccccgtgagcctgaatgtgccccgacccaaccaggtgagcgggcccgtcatgcccagcatgcctcccgggcagtggcagcaggcgccccttccccagcagcagcccatgccaggcttgcccaggcctgtgatatccatgcaggcccaggcggccgtggctgggccccggatgcccagcgtgcagccacccaggagcatctcacccagcgctctgcaagacctgctgcggaccctgaagtcgcccagctcccctcagcagcaacagcaggtgctgaacattctcaaatcaaacccgcagctaatggcagctttcatcaaacagcgcacagccaagtacgtggccaatcagcccggcatgcagccccagcctggcctccagtcccagcccggcatgcaaccccagcctggcatgcaccagcagcccagcctgcagaacctgaatgccatgcaggctggcgtgccgcggcccggtgtgcctccacagcagcaggcgatgggaggcctgaacccccagggccaggccttgaacatcatgaacccaggacacaaccccaacatggcgagtatgaatccacagtaccgagaaatgttacggaggcagctgctgcagcagcagcagcaacagcagcagcaacaacagcagcaacagcagcagcagcaagggagtgccggcatggctgggggcatggcggggcacggccagttccagcagcctcaaggacccggaagctacccaccggccatgcagcagcagcagcgcatgcagcagcatctccccntccagggcagctccatgggccagatggcggctcaaatggnaancttggccanatggggcaacccggggctgggggcaaaaancacccccaaatccancaagccntgnancancggattntgcagcaanagcaaatgaannaccaantnggtncccaggcnagccaaacccnganccccanaaaaaatgttntnaagaaancaangnctnnattcntggnanaaatnccnntcttnaaaaaagggggnttcnaccntttnntttnngggccatncaacntnnattnnccgntnnangaaaanccnctttnnanantttnccaaaggttncccccnnannnntcnggggnttttatannaatnggaacnaaaaaangtnccntnaaccnnaanntttnaatttttngnnnngnannaaaanngggggnnnnnnnttttttttttttn

SEQ ID NO: 428 - DNA, 1361 bp, Homo Sapiens
  misc_feature (887)..(887): n is a, c, g, or t
  misc_feature (903)..(903): n is a, c, g, or t
  misc_feature (951)..(953): n is a, c, g, or t
  misc_feature (956)..(956): n is a, c, g, or t
  misc_feature (965)..(1000): n is a, c, g, or t
  misc_feature (1004)..(1004): n is a, c, g, or t
  misc_feature (1009)..(1009): n is a, c, g, or t
  misc_feature (1013)..(1013): n is a, c, g, or t
  misc_feature (1015)..(1015): n is a, c, g, or t
  misc_feature (1020)..(1020): n is a, c, g, or t
  misc_feature (1030)..(1031): n is a, c, g, or t
  misc_feature (1034)..(1034): n is a, c, g, or t
  misc_feature (1047)..(1047): n is a, c, g, or t
  misc_feature (1051)..(1052): n is a, c, g, or t
  misc_feature (1058)..(1058): n is a, c, g, or t
  misc_feature (1062)..(1062): n is a, c, g, or t
  misc_feature (1064)..(1065): n is a, c, g, or t
  misc_feature (1068)..(1068): n is a, c, g, or t
  misc_feature (1078)..(1078): n is a, c, g, or t
  misc_feature (1080)..(1080): n is a, c, g, or t
  misc_feature (1082)..(1083): n is a, c, g, or t
  misc_feature (1088)..(1088): n is a, c, g, or t
  misc_feature (1093)..(1093): n is a, c, g, or t
  misc_feature (1100)..(1100): n is a, c, g, or t
  misc_feature (1110)..(1110): n is a, c, g, or t
  misc_feature (1118)..(1118): n is a, c, g, or t
  misc_feature (1127)..(1127): n is a, c, g, or t
  misc_feature (1141)..(1141): n is a, c, g, or t
  misc_feature (1149)..(1149): n is a, c, g, or t
  misc_feature (1152)..(1153): n is a, c, g, or t
  misc_feature (1155)..(1155): n is a, c, g, or t
  misc_feature (1174)..(1174): n is a, c, g, or t
  misc_feature (1178)..(1178): n is a, c, g, or t
  misc_feature (1180)..(1180): n is a, c, g, or t
  misc_feature (1183)..(1183): n is a, c, g, or t
  misc_feature (1187)..(1187): n is a, c, g, or t
  misc_feature (1193)..(1193): n is a, c, g, or t
  misc_feature (1206)..(1207): n is a, c, g, or t
  misc_feature (1210)..(1210): n is a, c, g, or t
  misc_feature (1226)..(1226): n is a, c, g, or t
  misc_feature (1228)..(1228): n is a, c, g, or t
  misc_feature (1231)..(1232): n is a, c, g, or t
  misc_feature (1235)..(1235): n is a, c, g, or t
  misc_feature (1239)..(1240): n is a, c, g, or t
  misc_feature (1247)..(1247): n is a, c, g, or t
  misc_feature (1255)..(1255): n is a, c, g, or t
  misc_feature (1261)..(1261): n is a, c, g, or t
  misc_feature (1263)..(1263): n is a, c, g, or t
  misc_feature (1271)..(1271): n is a, c, g, or t
  misc_feature (1274)..(1274): n is a, c, g, or t
  misc_feature (1278)..(1278): n is a, c, g, or t
  misc_feature (1292)..(1292): n is a, c, g, or t
  misc_feature (1298)..(1298): n is a, c, g, or t
  misc_feature (1340)..(1341): n is a, c, g, or t
  misc_feature (1350)..(1351): n is a, c, g, or t
  misc_feature (1357)..(1357): n is a, c, g, or t
tagagaaaattactatgagaggatcgcatcaccatcaccatcacggatcctatttaggtgacactatagaatcgtcgacccacgcgtccgaaaaagcatccaatcccgtggaggttggcatccaggtcacgccagaggatgacgattgtttatcaacgtcatctagaggaatttgccccaaacaggaacacatagcagataaacttctgcactggaggggcctctcctcccctcgttctgcacatggagctctaatccccacgcctgggatgagtgcagaatatgccccgcagggtatttgtaaagatgagcccagcagctacacatgtacaacttgcaaacagccattcaccagtgcatggtttctcttgcaacacgcacagaacactcatggattaagaatctacttagaaagcgaacacggaagtcccctgaccccgcgggttcttcacacacccccattcggcgtagtacccagagagctcaagatgtgtggcagttttcggatggaagctcgagagcccttaagttctgagaaaatttgaagcccccaggggtggggtggacgcgtgccgcccagtcgacgtcagcgtggtctgtcatcctgctagtttgtgatgttttctgacagtagcctccaagaagccgttgtgcgaagacagagtcctgcagagtccttccagcctaggcctgcagcgccattttatttatattttttaataaaaagtaaaaacaaaaaaacagacccacattggaacagtgaatcagtcccatagagagggcccgtggaccatcgctgtcatgagtgatgccctggcccttctgaaaccagccaacctaattacctgtattgtggaaatgcgcatgagtcccaaccccttgtttcnatacattctatgttgncttttaaaagtgtgcttaacattgacacaataaatgttggagcttttnnnaanaaaaaaaannnnnnnnnnnnnnnnnnnnnnnnnnnnnnnnnnnnaaanggggncccncnccctnataggggggnngantaaacttaattanctgnncttggnaacncnngtngaaaattccngnanngaccnccaanctccctntggatttttnaaaaaccncggttgccnccgggggttttttnttgggggnaanncnagcctgctggggaaatttncggncntangganctaaanggaaaaaaaaccnnggnaaacccccgtgtaaantnccnnggnctcnnaaaaaantttggggntttccncngtgcccanggnccanaaccaaacgttccngggaanagccttttaaacccaaaaaaaaaacagtttttcggccttttnnttttgcccnnggaaangccc

SEQ ID NO: 429 - DNA, 1370 bp, Homo Sapiens
  misc_feature (1)..(1): n is a, c, g, or t
  misc_feature (863)..(863): n is a, c, g, or t
  misc_feature (875)..(875): n is a, c, g, or t
  misc_feature (880)..(880): n is a, c, g, or t
  misc_feature (931)..(931): n is a, c, g, or t
  misc_feature (950)..(950): n is a, c, g, or t
  misc_feature (969)..(969): n is a, c, g, or t
  misc_feature (976)..(976): n is a, c, g, or t
  misc_feature (986)..(986): n is a, c, g, or t
  misc_feature (990)..(990): n is a, c, g, or t
  misc_feature (1003)..(1003): n is a, c, g, or t
  misc_feature (1011)..(1011): n is a, c, g, or t
  misc_feature (1013)..(1013): n is a, c, g, or t
  misc_feature (1017)..(1017): n is a, c, g, or t
  misc_feature (1021)..(1021): n is a, c, g, or t
  misc_feature (1024)..(1024): n is a, c, g, or t
  misc_feature (1033)..(1033): n is a, c, g, or t
  misc_feature (1036)..(1036): n is a, c, g, or t
  misc_feature (1039)..(1039): n is a, c, g, or t
  misc_feature (1041)..(1041): n is a, c, g, or t
  misc_feature (1048)..(1048): n is a, c, g, or t
  misc_feature (1055)..(1055): n is a, c, g, or t
  misc_feature (1057)..(1057): n is a, c, g, or t
  misc_feature (1060)..(1061): n is a, c, g, or t
  misc_feature (1067)..(1067): n is a, c, g, or t
  misc_feature (1079)..(1079): n is a, c, g, or t
  misc_feature (1083)..(1083): n is a, c, g, or t
  misc_feature (1087)..(1087): n is a, c, g, or t
  misc_feature (1090)..(1090): n is a, c, g, or t
  misc_feature (1093)..(1094): n is a, c, g, or t
  misc_feature (1096)..(1096): n is a, c, g, or t
  misc_feature (1117)..(1117): n is a, c, g, or t
  misc_feature (1120)..(1120): n is a, c, g, or t
  misc_feature (1134)..(1134): n is a, c, g, or t
  misc_feature (1138)..(1138): n is a, c, g, or t
  misc_feature (1140)..(1142): n is a, c, g, or t
  misc_feature (1145)..(1145): n is a, c, g, or t
  misc_feature (1153)..(1153): n is a, c, g, or t
  misc_feature (1159)..(1161): n is a, c, g, or t
  misc_feature (1166)..(1166): n is a, c, g, or t
  misc_feature (1169)..(1169): n is a, c, g, or t
  misc_feature (1173)..(1173): n is a, c, g, or t
  misc_feature (1182)..(1182): n is a, c, g, or t
  misc_feature (1187)..(1187): n is a, c, g, or t
  misc_feature (1191)..(1191): n is a, c, g, or t
  misc_feature (1205)..(1205): n is a, c, g, or t
  misc_feature (1210)..(1210): n is a, c, g, or t
  misc_feature (1222)..(1223): n is a, c, g, or t
  misc_feature (1225)..(1225): n is a, c, g, or t
  misc_feature (1227)..(1227): n is a, c, g, or t
  misc_feature (1229)..(1229): n is a, c, g, or t
  misc_feature (1231)..(1231): n is a, c, g, or t
  misc_feature (1233)..(1233): n is a, c, g, or t
  misc_feature (1237)..(1237): n is a, c, g, or t
  misc_feature (1241)..(1245): n is a, c, g, or t
  misc_feature (1252)..(1253): n is a, c, g, or t
  misc_feature (1259)..(1260): n is a, c, g, or t
  misc_feature (1266)..(1266): n is a, c, g, or t
  misc_feature (1268)..(1268): n is a, c, g, or t
  misc_feature (1270)..(1270): n is a, c, g, or t
  misc_feature (1276)..(1279): n is a, c, g, or t
  misc_feature (1284)..(1286): n is a, c, g, or t
  misc_feature (1289)..(1290): n is a, c, g, or t
  misc_feature (1292)..(1293): n is a, c, g, or t
  misc_feature (1302)..(1302): n is a, c, g, or t
  misc_feature (1304)..(1305): n is a, c, g, or t
  misc_feature (1309)..(1311): n is a, c, g, or t
  misc_feature (1313)..(1315): n is a, c, g, or t
  misc_feature (1319)..(1319): n is a, c, g, or t
  misc_feature (1321)..(1321): n is a, c, g, or t
  misc_feature (1325)..(1325): n is a, c, g, or t
  misc_feature (1330)..(1330): n is a, c, g, or t
  misc_feature (1332)..(1332): n is a, c, g, or t
  misc_feature (1335)..(1335): n is a, c, g, or t
  misc_feature (1339)..(1339): n is a, c, g, or t
  misc_feature (1349)..(1351): n is a, c, g, or t
  misc_feature (1353)..(1355): n is a, c, g, or t
  misc_feature (1357)..(1370): n is a, c, g, or t
nattagagagaattactatgagaggatcgcatcaccatcaccatcacggatcctatttaggtgacactatagaatcgtcgacccacgcgtccgtgcccattgaagacgtgctagcagctgccagttatctccacatgtatgacattgtcaaagtctgcaaaaagaagctgaaagagaaagccaccacggaggcagacagcaccaaaaaggaagaagatgcttcaagttgttcggacaaagtcgagagtctctccgatggcagcagccacatagcaggcgatttgcccagtgatgaagatgaaggagaagatgaaaaattgaacatcctgcccagcaaaagggacttggcggccgagcctgggaacatgtggatgcgattgccctcagactcagcaggcatcccccaggctggcggagaggcagagccacacgccacagcagctggaaaaacagtagccagcccctgcagctcaacagagtctttgtcccagaggtctgtcacctccgtgagggattcggcagatgttgactgtgtgctggacctgtctgtcaagtccagcctttcaggagttgaaaatctgaacagctcttatttctcttcacaggacgtgctgagaagcaacctggtgcaggtgaaggtggagaaagaggcttcctgtgatgagagtgatgttggcactaatgactatgacatggaacatagcactgtgaaagaaagtgtgagcactaataacagggtacagtatgagccggcccatctggctcccctgagggaggactcggtcttgagggagctggaccgggaggacaaagccagtgatgatgagatgatgaccccagagagcgagcgtgtccaggtgganggaggcatgganagcantctgctcccctacgtctccaacatcctgagccccgcggggccaaatcttcntgtgccccctgggcaacanggtcttccccagcccccanatcctgnaaaatccccntgancacgcacttccgncaagcagnanggcntccncancaagccccnccnccnantgtcaangtgcccncntgnntccctntgggggaaaaantttntctnggntgnnanccctccaacgccccaaaaggnatncctcgggggaaaancctnannntgnccccgggnggaaannnttccntantccnaaacctganccccnggcngggggccccccccnaaaanccccccctgaanngngngngncngttncccnnnnngggaacnntaaaannttttcnantnccgggnnnnggaannnttnngnnaaaaaaaantnntttnnntnnnaaangncctnaaaancnccnattngaattttttnnnannntnnnnnnnnnnnnnn

SEQ ID NO: 430 - DNA, 1274 bp, Homo Sapiens
  misc_feature (741)..(741): n is a, c, g, or t
  misc_feature (795)..(795): n is a, c, g, or t
  misc_feature (829)..(829): n is a, c, g, or t
  misc_feature (891)..(891): n is a, c, g, or t
  misc_feature (897)..(897): n is a, c, g, or t
  misc_feature (899)..(899): n is a, c, g, or t
  misc_feature (903)..(903): n is a, c, g, or t
  misc_feature (923)..(923): n is a, c, g, or t
  misc_feature (934)..(934): n is a, c, g, or t
  misc_feature (938)..(938): n is a, c, g, or t
  misc_feature (941)..(941): n is a, c, g, or t
  misc_feature (944)..(944): n is a, c, g, or t
  misc_feature (948)..(948): n is a, c, g, or t
  misc_feature (950)..(950): n is a, c, g, or t
  misc_feature (955)..(955): n is a, c, g, or t
  misc_feature (959)..(959): n is a, c, g, or t
  misc_feature (964)..(964): n is a, c, g, or t
  misc_feature (972)..(973): n is a, c, g, or t
  misc_feature (977)..(977): n is a, c, g, or t
  misc_feature (979)..(979): n is a, c, g, or t
  misc_feature (992)..(992): n is a, c, g, or t
  misc_feature (994)..(994): n is a, c, g, or t
  misc_feature (1005)..(1006): n is a, c, g, or t
  misc_feature (1014)..(1014): n is a, c, g, or t
  misc_feature (1017)..(1017): n is a, c, g, or t
  misc_feature (1025)..(1025): n is a, c, g, or t
  misc_feature (1028)..(1028): n is a, c, g, or t
  misc_feature (1031)..(1031): n is a, c, g, or t
  misc_feature (1035)..(1035): n is a, c, g, or t
  misc_feature (1041)..(1041): n is a, c, g, or t
  misc_feature (1048)..(1048): n is a, c, g, or t
  misc_feature (1055)..(1055): n is a, c, g, or t
  misc_feature (1063)..(1063): n is a, c, g, or t
  misc_feature (1073)..(1074): n is a, c, g, or t
  misc_feature (1084)..(1084): n is a, c, g, or t
  misc_feature (1089)..(1089): n is a, c, g, or t
  misc_feature (1092)..(1093): n is a, c, g, or t
  misc_feature (1095)..(1096): n is a, c, g, or t
  misc_feature (1103)..(1103): n is a, c, g, or t
  misc_feature (1105)..(1105): n is a, c, g, or t
  misc_feature (1109)..(1109): n is a, c, g, or t
  misc_feature (1113)..(1113): n is a, c, g, or t
  misc_feature (1117)..(1117): n is a, c, g, or t
  misc_feature (1120)..(1121): n is a, c, g, or t
  misc_feature (1124)..(1124): n is a, c, g, or t
  misc_feature (1128)..(1131): n is a, c, g, or t
  misc_feature (1134)..(1134): n is a, c, g, or t
  misc_feature (1137)..(1141): n is a, c, g, or t
  misc_feature (1143)..(1143): n is a, c, g, or t
  misc_feature (1148)..(1274): n is a, c, g, or t
tagagaaattactatgagaggatcgcatcaccatcaccatcacggatcctatttaggtgacactatagaatcgtcgacccacgcgtccggctcgcgatgcctctacacaagtatcccgtgtggctctggaagcggctgcagctgcgggagggcatctgttcccgcctgcccggccactacctgcgctccctggaggaggagcggacgcccactcccgtgcactataggcctcatggggccaagttcaagatcaaccccaagaacgggcagcgggagcgtgtggaggacgtgcccattcccatctactttccccccgaatcccagcgggggttgtggggcggcgagggctggatcctgggccaaatatatgccaacaacgacaagctctccaagaggctgaagaaagtgtggaagccacagctgtttgagcgagagttctacagtgagatcctggacaagaagttcacagtgactgtgaccatgcggaccctggacctcatcgatgaggcttacgggctcgacttttacatcctcaagaccccgaaggaggacctgtgctccaagtttgggatggacctgaagcgagggatgctgctgcggcttgcccggcaggacccccagctgcaccccgaggaccccgagcggcgggcagccatctacgacaagtacaaggaatttgccatcccagaggaggaggcagagtgggtgggcctcacgctggaggaggccattgagaagcanagacttttggaggaaaaggaccctgtacccctgttcaagatctatgtggcgganctgatccagcagctgcagcagcaggcactgtcanagccggcggtggtgcaaaaaaaagccagtggccagtgaccacacagctcctccatgcctgancaaaangnccanctttccctgccaggcctttngcactgagganacanatnccngggnanctgtnaggnccccngtgggcanngggngnatcctggtttcgngngctgcccatgnncctttcanccnggggccanctnggnaggnatcccnagaagcntgggccncccaaagntcctctaggnngggccccaanttttnggnnannttccttngncccngggnccgnaannaanaaannnnggnccnnnnnanaaaannnnnnnnnnnnnnnnnnnnnnnnnnnnnnnnnnnnnnnnnnnnnnnnnnnnnnnnnnnnnnnnnnnnnnnnnnnnnnnnnnnnnnnnnnnnnnnnnnnnnnnnnnnnnnnnnnnnnnnnnnnnnnn

SEQ ID NO: 431 - DNA, 1376 bp, Homo Sapiens
  misc_feature (1)..(1): n is a, c, g, or t
  misc_feature (688)..(733): n is a, c, g, or t
  misc_feature (765)..(765): n is a, c, g, or t
  misc_feature (771)..(771): n is a, c, g, or t
  misc_feature (780)..(780): n is a, c, g, or t
  misc_feature (785)..(785): n is a, c, g, or t
  misc_feature (802)..(802): n is a, c, g, or t
  misc_feature (804)..(804): n is a, c, g, or t
  misc_feature (821)..(821): n is a, c, g, or t
  misc_feature (829)..(829): n is a, c, g, or t
  misc_feature (848)..(848): n is a, c, g, or t
  misc_feature (859)..(859): n is a, c, g, or t
  misc_feature (862)..(862): n is a, c, g, or t
  misc_feature (881)..(881): n is a, c, g, or t
  misc_feature (889)..(889): n is a, c, g, or t
  misc_feature (893)..(893): n is a, c, g, or t
  misc_feature (900)..(900): n is a, c, g, or t
  misc_feature (913)..(913): n is a, c, g, or t
  misc_feature (922)..(922): n is a, c, g, or t
  misc_feature (959)..(959): n is a, c, g, or t
  misc_feature (972)..(972): n is a, c, g, or t
  misc_feature (975)..(976): n is a, c, g, or t
  misc_feature (978)..(978): n is a, c, g, or t
  misc_feature (980)..(980): n is a, c, g, or t
  misc_feature (1004)..(1005): n is a, c, g, or t
  misc_feature (1008)..(1009): n is a, c, g, or t
  misc_feature (1014)..(1014): n is a, c, g, or t
  misc_feature (1018)..(1018): n is a, c, g, or t
  misc_feature (1020)..(1020): n is a, c, g, or t
  misc_feature (1024)..(1024): n is a, c, g, or t
  misc_feature (1034)..(1034): n is a, c, g, or t
  misc_feature (1039)..(1039): n is a, c, g, or t
  misc_feature (1051)..(1051): n is a, c, g, or t
  misc_feature (1055)..(1055): n is a, c, g, or t
  misc_feature (1058)..(1058): n is a, c, g, or t
  misc_feature (1082)..(1082): n is a, c, g, or t
  misc_feature (1085)..(1085): n is a, c, g, or t
  misc_feature (1088)..(1088): n is a, c, g, or t
  misc_feature (1091)..(1091): n is a, c, g, or t
  misc_feature (1096)..(1096): n is a, c, g, or t
  misc_feature (1100)..(1100): n is a, c, g, or t
  misc_feature (1113)..(1113): n is a, c, g, or t
  misc_feature (1115)..(1115): n is a, c, g, or t
  misc_feature (1118)..(1118): n is a, c, g, or t
  misc_feature (1132)..(1132): n is a, c, g, or t
  misc_feature (1135)..(1135): n is a, c, g, or t
  misc_feature (1137)..(1137): n is a, c, g, or t
  misc_feature (1145)..(1145): n is a, c, g, or t
  misc_feature (1148)..(1148): n is a, c, g, or t
  misc_feature (1152)..(1152): n is a, c, g, or t
  misc_feature (1154)..(1154): n is a, c, g, or t
  misc_feature (1156)..(1156): n is a, c, g, or t
  misc_feature (1158)..(1159): n is a, c, g, or t
  misc_feature (1161)..(1161): n is a, c, g, or t
  misc_feature (1169)..(1169): n is a, c, g, or t
  misc_feature (1173)..(1173): n is a, c, g, or t
  misc_feature (1175)..(1175): n is a, c, g, or t
  misc_feature (1177)..(1177): n is a, c, g, or t
  misc_feature (1185)..(1185): n is a, c, g, or t
  misc_feature (1192)..(1192): n is a, c, g, or t
  misc_feature (1194)..(1194): n is a, c, g, or t
  misc_feature (1205)..(1206): n is a, c, g, or t
  misc_feature (1217)..(1219): n is a, c, g, or t
  misc_feature (1231)..(1231): n is a, c, g, or t
  misc_feature (1237)..(1237): n is a, c, g, or t
  misc_feature (1239)..(1239): n is a, c, g, or t
  misc_feature (1243)..(1243): n is a, c, g, or t
  misc_feature (1245)..(1245): n is a, c, g, or t
  misc_feature (1247)..(1248): n is a, c, g, or t
  misc_feature (1254)..(1254): n is a, c, g, or t
  misc_feature (1256)..(1257): n is a, c, g, or t
  misc_feature (1264)..(1269): n is a, c, g, or t
  misc_feature (1274)..(1276): n is a, c, g, or t
  misc_feature (1280)..(1280): n is a, c, g, or t
  misc_feature (1283)..(1283): n is a, c, g, or t
  misc_feature (1285)..(1285): n is a, c, g, or t
  misc_feature (1289)..(1289): n is a, c, g, or t
  misc_feature (1296)..(1299): n is a, c, g, or t
  misc_feature (1302)..(1302): n is a, c, g, or t
  misc_feature (1305)..(1306): n is a, c, g, or t
  misc_feature (1308)..(1308): n is a, c, g, or t
  misc_feature (1312)..(1312): n is a, c, g, or t
  misc_feature (1320)..(1320): n is a, c, g, or t
  misc_feature (1324)..(1324): n is a, c, g, or t
  misc_feature (1327)..(1329): n is a, c, g, or t
  misc_feature (1334)..(1334): n is a, c, g, or t
  misc_feature (1339)..(1339): n is a, c, g, or t
  misc_feature (1341)..(1341): n is a, c, g, or t
  misc_feature (1351)..(1352): n is a, c, g, or t
  misc_feature (1355)..(1358): n is a, c, g, or t
  misc_feature (1361)..(1361): n is a, c, g, or t
  misc_feature (1367)..(1367): n is a, c, g, or t
  misc_feature (1369)..(1372): n is a, c, g, or t
  misc_feature (1374)..(1375): n is a, c, g, or t
naatagagaaattactatgagaggatcgcatcaccatcaccatcacggatcctatttaggtgacactatagaatcgtcgacccacgcgtccgaaagatgtcaatgctgccattgccaccatcaagaccaagcgtaccatccagtttgtggattggtgccccactggcttcaaggttggcatcaactaccagcctcccactgtggtgcctggtggagacctggccaaggtacagagagctgtgtgcatgctgagcaacaccacagccattgctgaggcctgggctcgcctggaccacaagtttgacctgatgtatgccaaacgtgcctttgttcactggtacgttggggaggggatggaggaaggtgagttttcagaggcccgtgaggacatggctgcccttgagaaggattatgaggaggttggtgtggattctgttgaaggagagggtgaggaagaaggagaggaatactaaagttaaaacgtcacaaaggtgctgcttttacagggaagcttattctgttttaaacattgaaaagttgtggtctgatcagttaatttgtatgtagcagtgtatgctctcatatacaattactgacctatgctctaaaacatgaatgctttgttacagacccaagctgtccatttctgtgatgggttttgaataaagtattccctgtcttaaatgannnnnnnnnnnnnnnnnnnnnnnnnnnnnnnnnnnnnnnnnnnnnnaaaaagggcggccgctccctatagtgagtcgnattaancttaattanctgancttggactcctgttgananatccagtaatgacctcnaaactccntctggatttgttcaaaacnctcggttgccnccnggcgttttttattggtganaatccaanctancttggcnaaattttccgganctaaggaanctaaatggaaaaaaaaatccctggaaaaacccccgtnaaaaattccccanggnntncnaaaaaaaaattttgaggcatttcnnccnnttgcncaangnaccnaaaacccaanccgtncacctggaaatnacgnccntttttaaaaaccgtaaaaaaaaanaanccnaanttttnaccnggcctttttttcnanttnttgccccccggaanaangncccccccnaanttcntnangnnanaaaaaaangggnancnggggaaanggaaaangntcccccttttnnccccttttccnnnaaaaaaaaaaantttttncncctngngnnaaaaanannaaaattnnnnnnttttnnnaaanttncnaaanggggggnnnnggnaanncncccntttccccngggnttnnnaaaanttttntncccccccccnnggnnnnccntttttntnnnncnna

SEQ ID NO: 432 - DNA, 806 bp, Homo Sapiens
ctttcttttaggaaggaaaattaactatgagaggatcgcatcaccatcaccatcacggatcctatttaggtgacaccaaagaatcgtcgacccacgcgtccggtgggggccggcgtcccctgcgtgtgtgtgtgtgtgtgtgtgtgtgtggatgtattgacctgtgtttcccaagacagcaggtgccacggcccgccccgcctgccagcccgaattcccgttctcctgtgtctactaacaaggacatgggggtgggcggtgacctccgcatccctcagagctcagagggtcctcgctgccaccggtccccccctagcccgtcatcagccggtggcagctccatcttccattcctggttttagggcagaatccatggagactgcttccagaaggcatctggctctgagttataaattacttccctggtcctgacagtcacctggggtcccccctctccctggttccacctttctgaggaggagcctggagtcagggctgggttttggattaacccatccttcctagttaacacctttttgtttttattttattttatttttgtttgttttctccgtgtgtgtgttttcctaatttatttacctctgtttcccctttttcctttttttttttaattaaagagcaaagctttttattactttgtaatttaaaaaactgaaaaaaaaaaaactgaagaactttggggggaattttgtacttttttcctgtgtaaatattggacttttttgagctttatcgtggttgttaatttgaagtaataaagtagaaaagataaagtgatgcaggct

SEQ ID NO: 433 - DNA, 1322 bp, Homo Sapiens
  misc_feature (1)..(1): n is a, c, g, or t
  misc_feature (6)..(6): n is a, c, g, or t
  misc_feature (582)..(582): n is a, c, g, or t
  misc_feature (599)..(599): n is a, c, g, or t
  misc_feature (623)..(623): n is a, c, g, or t
  misc_feature (626)..(626): n is a, c, g, or t
  misc_feature (727)..(727): n is a, c, g, or t
  misc_feature (762)..(762): n is a, c, g, or t
  misc_feature (767)..(767): n is a, c, g, or t
  misc_feature (771)..(771): n is a, c, g, or t
  misc_feature (785)..(785): n is a, c, g, or t
  misc_feature (788)..(788): n is a, c, g, or t
  misc_feature (790)..(790): n is a, c, g, or t
  misc_feature (802)..(802): n is a, c, g, or t
  misc_feature (804)..(804): n is a, c, g, or t
  misc_feature (808)..(808): n is a, c, g, or t
  misc_feature (814)..(814): n is a, c, g, or t
  misc_feature (820)..(820): n is a, c, g, or t
  misc_feature (826)..(826): n is a, c, g, or t
  misc_feature (829)..(829): n is a, c, g, or t
  misc_feature (832)..(832): n is a, c, g, or t
  misc_feature (837)..(837): n is a, c, g, or t
  misc_feature (842)..(842): n is a, c, g, or t
  misc_feature (847)..(847): n is a, c, g, or t
  misc_feature (864)..(864): n is a, c, g, or t
  misc_feature (866)..(866): n is a, c, g, or t
  misc_feature (868)..(868): n is a, c, g, or t
  misc_feature (893)..(893): n is a, c, g, or t
  misc_feature (898)..(898): n is a, c, g, or t
  misc_feature (900)..(900): n is a, c, g, or t
  misc_feature (902)..(902): n is a, c, g, or t
  misc_feature (904)..(905): n is a, c, g, or t
  misc_feature (911)..(911): n is a, c, g, or t
  misc_feature (914)..(916): n is a, c, g, or t
  misc_feature (919)..(919): n is a, c, g, or t
  misc_feature (923)..(923): n is a, c, g, or t
  misc_feature (930)..(930): n is a, c, g, or t
  misc_feature (932)..(932): n is a, c, g, or t
  misc_feature (937)..(937): n is a, c, g, or t
  misc_feature (940)..(940): n is a, c, g, or t
  misc_feature (945)..(945): n is a, c, g, or t
  misc_feature (955)..(955): n is a, c, g, or t
  misc_feature (962)..(962): n is a, c, g, or t
  misc_feature (964)..(964): n is a, c, g, or t
  misc_feature (967)..(967): n is a, c, g, or t
  misc_feature (973)..(973): n is a, c, g, or t
  misc_feature (979)..(980): n is a, c, g, or t
  misc_feature (986)..(988): n is a, c, g, or t
  misc_feature (997)..(997): n is a, c, g, or t
  misc_feature (1002)..(1002): n is a, c, g, or t
  misc_feature (1005)..(1006): n is a, c, g, or t
  misc_feature (1013)..(1013): n is a, c, g, or t
  misc_feature (1023)..(1023): n is a, c, g, or t
  misc_feature (1026)..(1026): n is a, c, g, or t
  misc_feature (1032)..(1032): n is a, c, g, or t
  misc_feature (1050)..(1052): n is a, c, g, or t
  misc_feature (1065)..(1065): n is a, c, g, or t
  misc_feature (1070)..(1070): n is a, c, g, or t
  misc_feature (1084)..(1084): n is a, c, g, or t
  misc_feature (1086)..(1086): n is a, c, g, or t
  misc_feature (1107)..(1107): n is a, c, g, or t
  misc_feature (1110)..(1110): n is a, c, g, or t
  misc_feature (1119)..(1119): n is a, c, g, or t
  misc_feature (1123)..(1123): n is a, c, g, or t
  misc_feature (1125)..(1125): n is a, c, g, or t
  misc_feature (1133)..(1136): n is a, c, g, or t
  misc_feature (1138)..(1138): n is a, c, g, or t
  misc_feature (1145)..(1145): n is a, c, g, or t
  misc_feature (1154)..(1155): n is a, c, g, or t
  misc_feature (1164)..(1165): n is a, c, g, or t
  misc_feature (1183)..(1183): n is a, c, g, or t
  misc_feature (1189)..(1189): n is a, c, g, or t
  misc_feature (1216)..(1216): n is a, c, g, or t
  misc_feature (1222)..(1223): n is a, c, g, or t
  misc_feature (1226)..(1227): n is a, c, g, or t
  misc_feature (1235)..(1235): n is a, c, g, or t
  misc_feature (1238)..(1238): n is a, c, g, or t
  misc_feature (1245)..(1245): n is a, c, g, or t
  misc_feature (1250)..(1250): n is a, c, g, or t
  misc_feature (1252)..(1253): n is a, c, g, or t
  misc_feature (1255)..(1255): n is a, c, g, or t
  misc_feature (1262)..(1262): n is a, c, g, or t
  misc_feature (1264)..(1264): n is a, c, g, or t
  misc_feature (1269)..(1270): n is a, c, g, or t
  misc_feature (1276)..(1276): n is a, c, g, or t
  misc_feature (1278)..(1279): n is a, c, g, or t
  misc_feature (1298)..(1298): n is a, c, g, or t
  misc_feature (1300)..(1301): n is a, c, g, or t
  misc_feature (1307)..(1309): n is a, c, g, or t
  misc_feature (1311)..(1311): n is a, c, g, or t
  misc_feature (1317)..(1317): n is a, c, g, or t
  misc_feature (1320)..(1320): n is a, c, g, or t
  misc_feature (1322)..(1322): n is a, c, g, or t
naattngagaaattactatgagaggatcgcatcaccatcaccatcacggatcctatttaggtgacactatagaatcgtcgacccacgcgtccgggtgctggccctgcccacgcctagggctccggcgcgtcacgggcctcagctgggattcccgcgcccctcggacggccacgagactcggacatctttccaggaacagcgtgaggaggacagaagcacccaacaggactgctcaagccacctgcgaacactgctgctaccatgcccaagagaaaggcaaaaggagatgctaaaggtgataaagcaaaggtgaaggatgagccacagaggagatcagctcggttgtctgctaaaccagctcctccaaaaccagagcccaggcctaaaaaggcctctgcaaagaagggagagaagcttcccaaagggagaaaggggaaagcagatgctggaaaggatggaaacaaccctgcaaaaaaccgagatgcctctacactccagtcccagaaagcggaaggcactggggatgccaagtgaaatgtacattttttgagagctctgtacttatagtgactctactgtttngaaatactatttttttnaattcaagttttataaaagtgtanaantttggcttttttaagttatgttgttagcacacaggacacttccttgttgtctttttgtggaagggcaagtaccactaatagggtgtatctcaaaaactganttgaaataagggaaaataggattttctgtcctggnttttngaanattgttcttgattnccntngattcccaggananattntctganatttcncgtgtncanccnctttnggacnggaancctttaagtgtgggggnancnaaaattttttgtctcctcttttccngatgncntnannataaanttnnnttncttnaaccgananttttnttngggcnttggcaaccntaaaatncnctntggttngggaannaaaacnnngggtttttnttttnaanntcccaantggggttccnttnaaaaanccaaaattcccgtttttnnntttggggaattcncccgnggggtttttttttnanccccccccgggcaaaaggggnccngaaaaaaantttnancttgcccnnnngngaaggtntcccccccnnttttaaaanntttttttttttaaaaaanaaaaanaaatttttttttattttttttggggantttttnnggnngggggttnggnaattttnaaaangnntnaaaattntnccccnntttccncnnaaaaaatttttttttaaantnntttaannngnaaaaanttntn

SEQ ID NO: 434 - DNA, 1416 bp, Homo Sapiens
  misc_feature (839)..(839): n is a, c, g, or t
  misc_feature (866)..(866): n is a, c, g, or t
  misc_feature (889)..(889): n is a, c, g, or t
  misc_feature (900)..(901): n is a, c, g, or t
  misc_feature (909)..(909): n is a, c, g, or t
  misc_feature (920)..(920): n is a, c, g, or t
  misc_feature (928)..(928): n is a, c, g, or t
  misc_feature (931)..(931): n is a, c, g, or t
  misc_feature (943)..(944): n is a, c, g, or t
  misc_feature (952)..(952): n is a, c, g, or t
  misc_feature (973)..(973): n is a, c, g, or t
  misc_feature (975)..(975): n is a, c, g, or t
  misc_feature (1001)..(1001): n is a, c, g, or t
  misc_feature (1013)..(1014): n is a, c, g, or t
  misc_feature (1016)..(1016): n is a, c, g, or t
  misc_feature (1018)..(1018): n is a, c, g, or t
  misc_feature (1021)..(1021): n is a, c, g, or t
  misc_feature (1029)..(1029): n is a, c, g, or t
  misc_feature (1049)..(1049): n is a, c, g, or t
  misc_feature (1051)..(1051): n is a, c, g, or t
  misc_feature (1055)..(1055): n is a, c, g, or t
  misc_feature (1062)..(1062): n is a, c, g, or t
  misc_feature (1065)..(1065): n is a, c, g, or t
  misc_feature (1072)..(1072): n is a, c, g, or t
  misc_feature (1090)..(1090): n is a, c, g, or t
  misc_feature (1095)..(1095): n is a, c, g, or t
  misc_feature (1099)..(1099): n is a, c, g, or t
  misc_feature (1101)..(1101): n is a, c, g, or t
  misc_feature (1106)..(1106): n is a, c, g, or t
  misc_feature (1141)..(1141): n is a, c, g, or t
  misc_feature (1144)..(1146): n is a, c, g, or t
  misc_feature (1155)..(1156): n is a, c, g, or t
  misc_feature (1163)..(1164): n is a, c, g, or t
  misc_feature (1175)..(1175): n is a, c, g, or t
  misc_feature (1197)..(1197): n is a, c, g, or t
  misc_feature (1199)..(1199): n is a, c, g, or t
  misc_feature (1203)..(1203): n is a, c, g, or t
  misc_feature (1213)..(1214): n is a, c, g, or t
  misc_feature (1218)..(1218): n is a, c, g, or t
  misc_feature (1226)..(1226): n is a, c, g, or t
  misc_feature (1228)..(1228): n is a, c, g, or t
  misc_feature (1231)..(1232): n is a, c, g, or t
  misc_feature (1234)..(1234): n is a, c, g, or t
  misc_feature (1236)..(1236): n is a, c, g, or t
  misc_feature (1245)..(1245): n is a, c, g, or t
  misc_feature (1249)..(1249): n is a, c, g, or t
  misc_feature (1252)..(1252): n is a, c, g, or t
  misc_feature (1254)..(1255): n is a, c, g, or t
  misc_feature (1257)..(1257): n is a, c, g, or t
  misc_feature (1260)..(1260): n is a, c, g, or t
  misc_feature (1270)..(1270): n is a, c, g, or t
  misc_feature (1274)..(1274): n is a, c, g, or t
  misc_feature (1276)..(1276): n is a, c, g, or t
  misc_feature (1279)..(1279): n is a, c, g, or t
  misc_feature (1288)..(1289): n is a, c, g, or t
  misc_feature (1291)..(1291): n is a, c, g, or t
  misc_feature (1301)..(1301): n is a, c, g, or t
  misc_feature (1303)..(1303): n is a, c, g, or t
  misc_feature (1312)..(1312): n is a, c, g, or t
  misc_feature (1315)..(1315): n is a, c, g, or t
  misc_feature (1319)..(1319): n is a, c, g, or t
  misc_feature (1341)..(1343): n is a, c, g, or t
  misc_feature (1352)..(1352): n is a, c, g, or t
  misc_feature (1356)..(1356): n is a, c, g, or t
  misc_feature (1362)..(1362): n is a, c, g, or t
  misc_feature (1369)..(1369): n is a, c, g, or t
  misc_feature (1377)..(1377): n is a, c, g, or t
  misc_feature (1393)..(1394): n is a, c, g, or t
  misc_feature (1401)..(1401): n is a, c, g, or t
  misc_feature (1410)..(1411): n is a, c, g, or t
  misc_feature (1413)..(1413): n is a, c, g, or t
  misc_feature (1415)..(1415): n is a, c, g, or t
tagagaaattactatgagaggatcgcatcaccatcaccatcacggatcctatttaggtgacactatagaatcgtcgacccacgcgtccgcgctaccggcgcctcctctgcggccactgagccggagccggcctgagcagcgctctcggttgcagtacccactggaaggacttaggcgctcgcgtggacaccgcaagcccctcagtagcctcggcccaagaggcctgctttccactcgctagccccgccgggggtccgtgtcctgtctcggtggccggacccgggcccgagcccgagcagtagccggcgccatgtcggtggtgggcatagacctgggcttccagagctgctacgtcgctgtggcccgcgccggcggcatcgagactatcgctaatgagtatagcgaccgctgcacgccggcttgcatttcttttggtcctaagaatcgttcaattggagcagcagctaaaagccaggtaatttctaatgcaaagaacacagtccaaggatttaaaagattccatggccgagcattctctgatccatttgtggaggcagaaaaatctaaccttgcatatgatattgtgcagttgcctacaggattaacaggtataaaggtgacatatatggaggaagagcgaaattttaccactgagcaagtgactgccatgcttttgtccaaactgaaggagacagccgaaagtgttcttaagaagcctgtagttgactgtgttgtttcggttccttgtttctatactgatgcagaaagacgatcagtgatggatgcaacacagattgctggtcttaattgcttgcgattaatgaatgaaaccactgcanttgctcttgcatatggaaatctataancaggatcttcctgcctttaaaanaaaaaacccannaaatgtanttttttgtaanacatgggnccncttctgctttannaagttttntgtatggtgcattttaataanangaaaaactgaaaagttcttggccccntgcattttgaanncnanttngggaaggntaaaaaattttgaagaaagngnttantaaaatnccntttctgngaaaaaaatttggggaanaaaanaaancntaaantttaaattccaaaaccggggcatttttaaaaaacnctnnncagggaggnnaaaaacnncaagaaatgtnagaggggaaaggtttcaaaatncncttngaaaattaanntttnaaaaaaantnaannantncgaaaattnaaanaangnnanttntggaaaaggncagnanttnttattaaannanaccccccttntnatggttttnganaaanccctttaaaaaaaaaatttttnnngggaaaatntggnggctanaaaaccncggggaanaaaaaatacaattttnnaaaaaanaaaaatagnngnana

SEQ ID NO: 435 - DNA, 1319 bp, Homo Sapiens
  misc_feature (3)..(3): n is a, c, g, or t
  misc_feature (748)..(748): n is a, c, g, or t
  misc_feature (907)..(907): n is a, c, g, or t
  misc_feature (939)..(939): n is a, c, g, or t
  misc_feature (949)..(949): n is a, c, g, or t
  misc_feature (951)..(951): n is a, c, g, or t
  misc_feature (956)..(956): n is a, c, g, or t
  misc_feature (968)..(968): n is a, c, g, or t
  misc_feature (970)..(970): n is a, c, g, or t
  misc_feature (978)..(978): n is a, c, g, or t
  misc_feature (984)..(984): n is a, c, g, or t
  misc_feature (989)..(989): n is a, c, g, or t
  misc_feature (1015)..(1015): n is a, c, g, or t
  misc_feature (1020)..(1020): n is a, c, g, or t
  misc_feature (1027)..(1027): n is a, c, g, or t
  misc_feature (1033)..(1033): n is a, c, g, or t
  misc_feature (1036)..(1036): n is a, c, g, or t
  misc_feature (1046)..(1046): n is a, c, g, or t
  misc_feature (1053)..(1054): n is a, c, g, or t
  misc_feature (1056)..(1056): n is a, c, g, or t
  misc_feature (1059)..(1060): n is a, c, g, or t
  misc_feature (1065)..(1065): n is a, c, g, or t
  misc_feature (1074)..(1075): n is a, c, g, or t
  misc_feature (1079)..(1079): n is a, c, g, or t
  misc_feature (1084)..(1084): n is a, c, g, or t
  misc_feature (1086)..(1086): n is a, c, g, or t
  misc_feature (1090)..(1092): n is a, c, g, or t
  misc_feature (1095)..(1095): n is a, c, g, or t
  misc_feature (1098)..(1098): n is a, c, g, or t
  misc_feature (1101)..(1101): n is a, c, g, or t
  misc_feature (1103)..(1105): n is a, c, g, or t
  misc_feature (1107)..(1107): n is a, c, g, or t
  misc_feature (1113)..(1113): n is a, c, g, or t
  misc_feature (1116)..(1116): n is a, c, g, or t
  misc_feature (1118)..(1120): n is a, c, g, or t
  misc_feature (1123)..(1125): n is a, c, g, or t
  misc_feature (1128)..(1131): n is a, c, g, or t
  misc_feature (1144)..(1145): n is a, c, g, or t
  misc_feature (1153)..(1153): n is a, c, g, or t
  misc_feature (1156)..(1156): n is a, c, g, or t
  misc_feature (1158)..(1158): n is a, c, g, or t
  misc_feature (1169)..(1169): n is a, c, g, or t
  misc_feature (1171)..(1174): n is a, c, g, or t
  misc_feature (1176)..(1176): n is a, c, g, or t
  misc_feature (1179)..(1179): n is a, c, g, or t
  misc_feature (1181)..(1181): n is a, c, g, or t
  misc_feature (1183)..(1186): n is a, c, g, or t
  misc_feature (1190)..(1190): n is a, c, g, or t
  misc_feature (1197)..(1198): n is a, c, g, or t
  misc_feature (1203)..(1204): n is a, c, g, or t
  misc_feature (1206)..(1206): n is a, c, g, or t
  misc_feature (1208)..(1208): n is a, c, g, or t
  misc_feature (1213)..(1213): n is a, c, g, or t
  misc_feature (1219)..(1222): n is a, c, g, or t
  misc_feature (1227)..(1227): n is a, c, g, or t
  misc_feature (1230)..(1231): n is a, c, g, or t
  misc_feature (1233)..(1234): n is a, c, g, or t
  misc_feature (1239)..(1243): n is a, c, g, or t
  misc_feature (1248)..(1255): n is a, c, g, or t
  misc_feature (1257)..(1299): n is a, c, g, or t
  misc_feature (1301)..(1305): n is a, c, g, or t
  misc_feature (1307)..(1309): n is a, c, g, or t
  misc_feature (1312)..(1317): n is a, c, g, or t
  misc_feature (1319)..(1319): n is a, c, g, or t
atngagaaattactatgagaggatcgcatcaccatcaccatcacggatcctatttaggtgacactatagaatcgtcgacccacgcgtccgatgcacagctggactaccaccggcaggccgtgcagatcctggacgagctggcggagaagctcaagcgcaggatgcgggaagcttcctcacgccctaagcgggagtataagcccaagccccgggagccctttgaccttggagagcctgagcagtccaacgggggcttcccctgcaccacagcccccaagatcgcagcttcatcgtctttccgatcttccgacaagcccatccggacccctagccggagcatgccgcccctggaccagccgagctgcaaggcgctgtacgacttcgagcccgagaacgacggggagctgggcttccatgagggcgacgtcatcacgctgaccaaccagatcgatgagaactggtacgagggcatgctggacggccagtcgggcttcttcccgctcagctacgtggaggtgcttgtgcccctgccgcagtgactcacccgtgtccccgccccgcccctccgtccacactggccggcaccccctgctgggtctcctgcattccacggagcccctgctgccagggcggtgtctgagcctgccggcgccacctgggccccggcccttgaggtactccctgagcaggaccccacacttgggtgggggggcttatctgggtgggtggggatgcctgtttacactancgctgactcccaacggtgacggctcccttccccactccatggcgccagcctcctcccccgctccccaacttctcgcccagctggccgaggcggggcaacactaaggtgctcttaaaaacactaatgttcctctggggcagcccccacctccgtcctganccgacgggggcccggcccactgcctaccttcnagtcccgcancnttaanaggatgggatcnanggtccccntggggnggctnaaaaaagaaccctggttttaaatccncccanccggggntggganggncctggcctantccaggnnantgnncccgncttaaaaannattnttttntnaggnnnggnaanggncnnncncctccnggncnnnttnnnttnnnnccgggaaaaagcnntggatttnctnanaaaaaaaatgntnnnngnggncntnnnncaanccccccnnaaaannananttttntttttnnnnccccnccnncnnggggnnnnnttttnnnnnnnntnnnnnnnnnnnnnnnnnnnnnnnnnnnnnnnnnnnnnnnnnnngnnnnnannnttnnnnnntn

SEQ ID NO: 436 - DNA, 1217 bp, Homo Sapiens
  misc_feature (310)..(310): n is a, c, g, or t
  misc_feature (323)..(323): n is a, c, g, or t
  misc_feature (339)..(340): n is a, c, g, or t
  misc_feature (347)..(347): n is a, c, g, or t
  misc_feature (392)..(392): n is a, c, g, or t
  misc_feature (397)..(397): n is a, c, g, or t
  misc_feature (401)..(401): n is a, c, g, or t
  misc_feature (404)..(404): n is a, c, g, or t
  misc_feature (413)..(413): n is a, c, g, or t
  misc_feature (427)..(428): n is a, c, g, or t
  misc_feature (433)..(433): n is a, c, g, or t
  misc_feature (435)..(435): n is a, c, g, or t
  misc_feature (466)..(466): n is a, c, g, or t
  misc_feature (481)..(481): n is a, c, g, or t
  misc_feature (489)..(489): n is a, c, g, or t
  misc_feature (500)..(500): n is a, c, g, or t
  misc_feature (502)..(502): n is a, c, g, or t
  misc_feature (512)..(512): n is a, c, g, or t
  misc_feature (518)..(518): n is a, c, g, or t
  misc_feature (525)..(525): n is a, c, g, or t
  misc_feature (535)..(535): n is a, c, g, or t
  misc_feature (551)..(552): n is a, c, g, or t
  misc_feature (554)..(554): n is a, c, g, or t
  misc_feature (559)..(559): n is a, c, g, or t
  misc_feature (563)..(563): n is a, c, g, or t
  misc_feature (580)..(580): n is a, c, g, or t
  misc_feature (585)..(585): n is a, c, g, or t
  misc_feature (588)..(589): n is a, c, g, or t
  misc_feature (602)..(602): n is a, c, g, or t
  misc_feature (604)..(606): n is a, c, g, or t
  misc_feature (610)..(613): n is a, c, g, or t
  misc_feature (616)..(616): n is a, c, g, or t
  misc_feature (630)..(630): n is a, c, g, or t
  misc_feature (633)..(633): n is a, c, g, or t
  misc_feature (647)..(648): n is a, c, g, or t
  misc_feature (654)..(656): n is a, c, g, or t
  misc_feature (661)..(661): n is a, c, g, or t
  misc_feature (678)..(678): n is a, c, g, or t
  misc_feature (684)..(684): n is a, c, g, or t
  misc_feature (687)..(687): n is a, c, g, or t
  misc_feature (691)..(692): n is a, c, g, or t
  misc_feature (702)..(703): n is a, c, g, or t
  misc_feature (705)..(705): n is a, c, g, or t
  misc_feature (707)..(707): n is a, c, g, or t
  misc_feature (715)..(715): n is a, c, g, or t
  misc_feature (723)..(723): n is a, c, g, or t
  misc_feature (731)..(731): n is a, c, g, or t
  misc_feature (745)..(745): n is a, c, g, or t
  misc_feature (749)..(751): n is a, c, g, or t
  misc_feature (753)..(753): n is a, c, g, or t
  misc_feature (759)..(759): n is a, c, g, or t
  misc_feature (761)..(762): n is a, c, g, or t
  misc_feature (767)..(768): n is a, c, g, or t
  misc_feature (773)..(774): n is a, c, g, or t
  misc_feature (779)..(780): n is a, c, g, or t
  misc_feature (788)..(793): n is a, c, g, or t
  misc_feature (798)..(798): n is a, c, g, or t
  misc_feature (803)..(804): n is a, c, g, or t
  misc_feature (806)..(808): n is a, c, g, or t
  misc_feature (822)..(823): n is a, c, g, or t
  misc_feature (825)..(825): n is a, c, g, or t
  misc_feature (827)..(828): n is a, c, g, or t
  misc_feature (837)..(837): n is a, c, g, or t
  misc_feature (840)..(840): n is a, c, g, or t
  misc_feature (845)..(845): n is a, c, g, or t
  misc_feature (847)..(847): n is a, c, g, or t
  misc_feature (859)..(860): n is a, c, g, or t
  misc_feature (870)..(877): n is a, c, g, or t
  misc_feature (879)..(879): n is a, c, g, or t
  misc_feature (884)..(884): n is a, c, g, or t
  misc_feature (889)..(889): n is a, c, g, or t
  misc_feature (891)..(891): n is a, c, g, or t
  misc_feature (893)..(897): n is a, c, g, or t
  misc_feature (914)..(915): n is a, c, g, or t
  misc_feature (929)..(932): n is a, c, g, or t
  misc_feature (941)..(941): n is a, c, g, or t
  misc_feature (943)..(943): n is a, c, g, or t
  misc_feature (954)..(970): n is a, c, g, or t
  misc_feature (980)..(980): n is a, c, g, or t
  misc_feature (991)..(993): n is a, c, g, or t
  misc_feature (995)..(1000): n is a, c, g, or t
  misc_feature (1003)..(1006): n is a, c, g, or t
  misc_feature (1009)..(1014): n is a, c, g, or t
  misc_feature (1023)..(1023): n is a, c, g, or t
  misc_feature (1037)..(1038): n is a, c, g, or t
  misc_feature (1047)..(1061): n is a, c, g, or t
  misc_feature (1063)..(1064): n is a, c, g, or t
  misc_feature (1076)..(1078): n is a, c, g, or t
  misc_feature (1092)..(1114): n is a, c, g, or t
  misc_feature (1122)..(1124): n is a, c, g, or t
  misc_feature (1132)..(1132): n is a, c, g, or t
  misc_feature (1134)..(1170): n is a, c, g, or t
  misc_feature (1180)..(1181): n is a, c, g, or t
  misc_feature (1184)..(1197): n is a, c, g, or t
  misc_feature (1202)..(1202): n is a, c, g, or t
  misc_feature (1204)..(1205): n is a, c, g, or t
  misc_feature (1217)..(1217): n is a, c, g, or t
tagagaaattactatgagaggatcgcatcaccatcaccatcacggatcctatttaggtgacactatagaatcgtcgacccacgcgtccgggagaagtggtgaaaaggtcccgtttgtgcagacatattccttgagagcatttgagaaaccccctcaggtacagacccaggctcttcgagactttgagaagcacctcaatgacctgaagaaggagaacttcagcctcaagctgcgcatctacttcctggaggagcgcatgcaacagaagtatgaggccagccgggaggacatctacaagcggaacactganctgaaggttgaantggaaagcttgaaccnnaactccnggacaaaaacagcctctggataaaacatgggctgagggggaaatnccacngtcnaanggaactgantcccaccccctttnnggacncnccccggaacggacctgtttttaacccttggnaaaaaaaaggccctnccgggggngaatccccccnanaaaaaaaaancccccnggagggncccttggggnaaaaaaaaaggggttnncngggcncccncaaaaaatggggggggnccccnaanntggggaaattttncnnnaaannnnttnccccccaaaaaaanttnggggcctgcccaannaaaaannnccccncccccccccccgggggngacccnctnttgnngggggaaaannanancccccccnaaaaaaangggggggnaaaaaaaaaaaaancccnnnantttttntnnttttnnaaaannccccnntttttttnnnnnnccccnaaaanngnnncccccccccccccnnangnnttttttttnccnaaaantntttttttttttnncccccccccnnnnnnnngnggggnggggngngnnnnnaaaaaaaaaaaaaaaannccccccccccctcnnnnaaaaaaaantnttttttttttnnnnnnnnnnnnnnnnncccccccccnaaaaaaaaaannntnnnnnnttnnnnttnnnnnnaaaaaaaangggggggggggggnnccccccccnnnnnnnnnnnnnnntnntttttttttttnnnaaaaaaaaaaaaannnnnnnnnnnnnnnnnnnnnnncccccccnnntttttttntnnnnnnnnnnnnnnnnnnnnnnnnnnnnnnnnnnnnnaaaaaaaaannaannnnnnnnnnnnnnccccncnntttttttttttn

SEQ ID NO: 437 - DNA, 1405 bp, Homo Sapiens
  misc_feature (853)..(853): n is a, c, g, or t
  misc_feature (868)..(868): n is a, c, g, or t
  misc_feature (904)..(904): n is a, c, g, or t
  misc_feature (911)..(911): n is a, c, g, or t
  misc_feature (920)..(920): n is a, c, g, or t
  misc_feature (948)..(948): n is a, c, g, or t
  misc_feature (955)..(955): n is a, c, g, or t
  misc_feature (959)..(959): n is a, c, g, or t
  misc_feature (969)..(969): n is a, c, g, or t
  misc_feature (979)..(979): n is a, c, g, or t
  misc_feature (984)..(984): n is a, c, g, or t
  misc_feature (986)..(986): n is a, c, g, or t
  misc_feature (993)..(993): n is a, c, g, or t
  misc_feature (1012)..(1012): n is a, c, g, or t
  misc_feature (1027)..(1027): n is a, c, g, or t
  misc_feature (1029)..(1029): n is a, c, g, or t
  misc_feature (1031)..(1031): n is a, c, g, or t
  misc_feature (1034)..(1034): n is a, c, g, or t
  misc_feature (1047)..(1074): n is a, c, g, or t
  misc_feature (1076)..(1077): n is a, c, g, or t
  misc_feature (1079)..(1079): n is a, c, g, or t
  misc_feature (1081)..(1083): n is a, c, g, or t
  misc_feature (1085)..(1085): n is a, c, g, or t
  misc_feature (1088)..(1088): n is a, c, g, or t
  misc_feature (1092)..(1092): n is a, c, g, or t
  misc_feature (1095)..(1099): n is a, c, g, or t
  misc_feature (1106)..(1106): n is a, c, g, or t
  misc_feature (1110)..(1110): n is a, c, g, or t
  misc_feature (1114)..(1116): n is a, c, g, or t
  misc_feature (1119)..(1119): n is a, c, g, or t
  misc_feature (1122)..(1122): n is a, c, g, or t
  misc_feature (1127)..(1127): n is a, c, g, or t
  misc_feature (1131)..(1132): n is a, c, g, or t
  misc_feature (1137)..(1141): n is a, c, g, or t
  misc_feature (1143)..(1144): n is a, c, g, or t
  misc_feature (1147)..(1149): n is a, c, g, or t
  misc_feature (1153)..(1154): n is a, c, g, or t
  misc_feature (1163)..(1163): n is a, c, g, or t
  misc_feature (1170)..(1170): n is a, c, g, or t
  misc_feature (1174)..(1176): n is a, c, g, or t
  misc_feature (1178)..(1178): n is a, c, g, or t
  misc_feature (1180)..(1180): n is a, c, g, or t
  misc_feature (1182)..(1183): n is a, c, g, or t
  misc_feature (1186)..(1187): n is a, c, g, or t
  misc_feature (1191)..(1191): n is a, c, g, or t
  misc_feature (1199)..(1199): n is a, c, g, or t
  misc_feature (1202)..(1202): n is a, c, g, or t
  misc_feature (1208)..(1208): n is a, c, g, or t
  misc_feature (1210)..(1214): n is a, c, g, or t
  misc_feature (1218)..(1220): n is a, c, g, or t
  misc_feature (1222)..(1222): n is a, c, g, or t
  misc_feature (1227)..(1227): n is a, c, g, or t
  misc_feature (1229)..(1230): n is a, c, g, or t
  misc_feature (1232)..(1238): n is a, c, g, or t
  misc_feature (1242)..(1242): n is a, c, g, or t
  misc_feature (1244)..(1244): n is a, c, g, or t
  misc_feature (1251)..(1254): n is a, c, g, or t
  misc_feature (1256)..(1257): n is a, c, g, or t
  misc_feature (1259)..(1261): n is a, c, g, or t
  misc_feature (1263)..(1265): n is a, c, g, or t
  misc_feature (1268)..(1268): n is a, c, g, or t
  misc_feature (1272)..(1272): n is a, c, g, or t
  misc_feature (1274)..(1276): n is a, c, g, or t
  misc_feature (1278)..(1283): n is a, c, g, or t
  misc_feature (1293)..(1293): n is a, c, g, or t
  misc_feature (1295)..(1296): n is a, c, g, or t
  misc_feature (1300)..(1313): n is a, c, g, or t
  misc_feature (1315)..(1315): n is a, c, g, or t
  misc_feature (1317)..(1329): n is a, c, g, or t
  misc_feature (1332)..(1334): n is a, c, g, or t
  misc_feature (1339)..(1339): n is a, c, g, or t
  misc_feature (1342)..(1343): n is a, c, g, or t
  misc_feature (1352)..(1355): n is a, c, g, or t
  misc_feature (1359)..(1362): n is a, c, g, or t
  misc_feature (1371)..(1375): n is a, c, g, or t
  misc_feature (1378)..(1384): n is a, c, g, or t
  misc_feature (1386)..(1391): n is a, c, g, or t
  misc_feature (1393)..(1401): n is a, c, g, or t
  misc_feature (1403)..(1405): n is a, c, g, or t
tagagaaattactatgagaggatcgcatcaccatcaccatcacggatcctatttaggtgacactatagaatcgtcgacccacgcgtccgctcccgcagccgcagccgccgtgctcagcgcgagccccggagcccttgagcgcgaggcgcggagcccccggagcccccaaaccgcagacacatccccgcgccccagagccccggcctgcgcgcccagccgggcccgcgcgatgccctcagaccggcctttcaagcagcggcggagcttcgccgaccgctgtaaggaggtacagcagatccgcgaccagcaccccagcaaaatcccggtgatcatcgagcgctacaagggtgagaagcagctgcccgtcctggacaagaccaagtttttggtcccggaccatgtcaacatgagcgagttggtcaagatcatccggcgccgcctgcagctgaaccccacgcaggccttcttcctgctggtgaaccagcacagcatggtgagtgtgtccacgcccatcgcggacatctacgagcaggagaaagacgaggacggcttcctctatatggtctacgcctcccaggaaaccttcggcttctgagccagcagtaggggggctcggcctgggagtcggggggccccggtcaggccctgcccagagagctcctggttcctgaactgagctgcctctaccgtggtgggctgggcaggcatgtgcccccctagtcagagggcaccaacccacctactctgcccctgggtggatcctgggccggtcgtgttagggttgtccctctgggtgctggctggtgggatgggggagggtggggagcaactcccagcacccctgctgtgtggntcatcttttttttangccccctgcctgtctgcccatctgcccctcacccanccgaggntctgcccancgcctggaactgcccacccctgaaaaantggcccntggntccccgcccntttgttttcngtggngnaaggatntggggtcattgtccctttnaaaaaaaaaaattgntnangcntgcttgaaaaaannnnnnnnnnnnnnnnnnnnnnnnnnnngnngncnnntnccnatanggnnnnnaattaantttnatannnaanttngatcntttnnaaaannnnnannacnnnaaannccttttganttttttnaaannntngntnnccnngggntttttttnggnaaatcnannnnnttgnnnanttttngnntnnnnnnntaangnaaaaaannnngnnannncnnntanattncnnngnnnnnnaaaaattttngnntttnnnnnnnnnnnnnnanannnnnnnnnnnnntannnttttnaannaaaaaaaannnntttnnnnttttttttnnnnnaannnnnnntnnnnnnannnnnnnnntnnn

SEQ ID NO: 438 - DNA, 1192 bp, Homo Sapiens
caactaaaggagggagaattaactatgagaggatcgcatcaccatcaccatcacggatcctatttaggtgacactatagaatcgtcgacccacgcgtccgctcttactgaacataagataattcatactggagagaaaccctacaaatgtgaagaatgtggcaaagcatttagccaatcctcaaccctaactagacatacgaggatgcacactggagagaaaccatacaaatgtgaagaatgtggcaaagcttttaatcgatcctcaaagcttactacacataagataattcatactggagagaaaccttacaagtgtgaagaatgtggcaaagcatttatatcatcctcaaccctaaatggacataagagaattcatactagagagaaaccctacaaatgtgaagaatgtggcaaagcatttagccaatcttcaaccctaactagacataagaggttgcacaccggagagaaaccctacaaatgtggagaatgtggcaaagcctttaaagagtcctcagctcttactaaacataagataattcacactggagagaaaccctacaaatgtgaaaaatgtggcaaagcctttaaccagtcttcaatccttactaaccataagaaaattcatactatcacacctgtaatcccagcactttgggaggccgaggcgggcggatcacgaggtcaggagatggagaccatcctggctaacacagtgaaaccccttctctactaaaaaatacaaaaaattagccgggcgtggtggcgggcgcctgtagtcccagctatgcgagaggctgaggcaggagaatggcgtgaacccgggaggcggagcttgcagtgagccgagatcacgccactgcactcaagcctgggcgacagagcgagactccgtctcaaaaaaaaaaaaagaaaattcatactagagagaaaccctacaaatataaagaatgtgcaaatcttttaaccggtcttcaacctttactaaacatagtattcatactgagtaaactctacaatgtgagatgtgcaatcttttttctgtctcagcctaaccagaatagaaatcatactgacagcaccctacaacagaattgcagctttacagttcaacttactacgatagatactcattgaagaacctacaggttatatgtgttaggctataaaggtctgattctacgactaat

SEQ ID NO: 439 - DNA, 1388 bp, Homo Sapiens
  misc_feature (671)..(671): n is a, c, g, or t
  misc_feature (805)..(806): n is a, c, g, or t
  misc_feature (822)..(823): n is a, c, g, or t
  misc_feature (827)..(828): n is a, c, g, or t
  misc_feature (835)..(835): n is a, c, g, or t
  misc_feature (853)..(853): n is a, c, g, or t
  misc_feature (855)..(855): n is a, c, g, or t
  misc_feature (879)..(880): n is a, c, g, or t
  misc_feature (889)..(889): n is a, c, g, or t
  misc_feature (893)..(893): n is a, c, g, or t
  misc_feature (918)..(919): n is a, c, g, or t
  misc_feature (921)..(921): n is a, c, g, or t
  misc_feature (923)..(923): n is a, c, g, or t
  misc_feature (925)..(925): n is a, c, g, or t
  misc_feature (937)..(937): n is a, c, g, or t
  misc_feature (943)..(943): n is a, c, g, or t
  misc_feature (952)..(953): n is a, c, g, or t
  misc_feature (962)..(962): n is a, c, g, or t
  misc_feature (965)..(965): n is a, c, g, or t
  misc_feature (970)..(970): n is a, c, g, or t
  misc_feature (973)..(973): n is a, c, g, or t
  misc_feature (976)..(976): n is a, c, g, or t
  misc_feature (986)..(986): n is a, c, g, or t
  misc_feature (988)..(990): n is a, c, g, or t
  misc_feature (998)..(998): n is a, c, g, or t
  misc_feature (1005)..(1005): n is a, c, g, or t
  misc_feature (1007)..(1007): n is a, c, g, or t
  misc_feature (1012)..(1013): n is a, c, g, or t
  misc_feature (1017)..(1017): n is a, c, g, or t
  misc_feature (1024)..(1027): n is a, c, g, or t
  misc_feature (1030)..(1030): n is a, c, g, or t
  misc_feature (1041)..(1041): n is a, c, g, or t
  misc_feature (1045)..(1045): n is a, c, g, or t
  misc_feature (1049)..(1051): n is a, c, g, or t
  misc_feature (1054)..(1054): n is a, c, g, or t
  misc_feature (1056)..(1056): n is a, c, g, or t
  misc_feature (1059)..(1059): n is a, c, g, or t
  misc_feature (1062)..(1062): n is a, c, g, or t
  misc_feature (1067)..(1067): n is a, c, g, or t
  misc_feature (1073)..(1074): n is a, c, g, or t
  misc_feature (1078)..(1078): n is a, c, g, or t
  misc_feature (1083)..(1083): n is a, c, g, or t
  misc_feature (1085)..(1085): n is a, c, g, or t
  misc_feature (1087)..(1087): n is a, c, g, or t
  misc_feature (1089)..(1091): n is a, c, g, or t
  misc_feature (1094)..(1095): n is a, c, g, or t
  misc_feature (1105)..(1105): n is a, c, g, or t
  misc_feature (1109)..(1110): n is a, c, g, or t
  misc_feature (1118)..(1121): n is a, c, g, or t
  misc_feature (1124)..(1128): n is a, c, g, or t
  misc_feature (1130)..(1131): n is a, c, g, or t
  misc_feature (1134)..(1134): n is a, c, g, or t
  misc_feature (1141)..(1143): n is a, c, g, or t
  misc_feature (1150)..(1151): n is a, c, g, or t
  misc_feature (1154)..(1154): n is a, c, g, or t
  misc_feature (1157)..(1157): n is a, c, g, or t
  misc_feature (1167)..(1167): n is a, c, g, or t
  misc_feature (1171)..(1171): n is a, c, g, or t
  misc_feature (1174)..(1174): n is a, c, g, or t
  misc_feature (1176)..(1178): n is a, c, g, or t
  misc_feature (1181)..(1184): n is a, c, g, or t
  misc_feature (1186)..(1187): n is a, c, g, or t
  misc_feature (1189)..(1190): n is a, c, g, or t
  misc_feature (1192)..(1192): n is a, c, g, or t
  misc_feature (1194)..(1195): n is a, c, g, or t
  misc_feature (1199)..(1199): n is a, c, g, or t
  misc_feature (1204)..(1204): n is a, c, g, or t
  misc_feature (1210)..(1214): n is a, c, g, or t
  misc_feature (1216)..(1218): n is a, c, g, or t
  misc_feature (1220)..(1221): n is a, c, g, or t
  misc_feature (1223)..(1227): n is a, c, g, or t
  misc_feature (1230)..(1231): n is a, c, g, or t
  misc_feature (1233)..(1233): n is a, c, g, or t
  misc_feature (1237)..(1237): n is a, c, g, or t
  misc_feature (1240)..(1240): n is a, c, g, or t
  misc_feature (1242)..(1242): n is a, c, g, or t
  misc_feature (1244)..(1245): n is a, c, g, or t
  misc_feature (1248)..(1254): n is a, c, g, or t
  misc_feature (1256)..(1256): n is a, c, g, or t
  misc_feature (1259)..(1259): n is a, c, g, or t
  misc_feature (1261)..(1264): n is a, c, g, or t
  misc_feature (1270)..(1270): n is a, c, g, or t
  misc_feature (1273)..(1273): n is a, c, g, or t
  misc_feature (1279)..(1279): n is a, c, g, or t
  misc_feature (1281)..(1281): n is a, c, g, or t
  misc_feature (1283)..(1288): n is a, c, g, or t
  misc_feature (1291)..(1291): n is a, c, g, or t
  misc_feature (1293)..(1294): n is a, c, g, or t
  misc_feature (1298)..(1298): n is a, c, g, or t
  misc_feature (1300)..(1302): n is a, c, g, or t
  misc_feature (1305)..(1306): n is a, c, g, or t
  misc_feature (1308)..(1313): n is a, c, g, or t
  misc_feature (1316)..(1318): n is a, c, g, or t
  misc_feature (1320)..(1320): n is a, c, g, or t
  misc_feature (1325)..(1326): n is a, c, g, or t
  misc_feature (1329)..(1331): n is a, c, g, or t
  misc_feature (1333)..(1333): n is a, c, g, or t
  misc_feature (1335)..(1335): n is a, c, g, or t
  misc_feature (1340)..(1340): n is a, c, g, or t
  misc_feature (1342)..(1343): n is a, c, g, or t
  misc_feature (1345)..(1347): n is a, c, g, or t
  misc_feature (1349)..(1350): n is a, c, g, or t
  misc_feature (1353)..(1360): n is a, c, g, or t
  misc_feature (1362)..(1362): n is a, c, g, or t
  misc_feature (1364)..(1368): n is a, c, g, or t
  misc_feature (1371)..(1372): n is a, c, g, or t
  misc_feature (1374)..(1375): n is a, c, g, or t
  misc_feature (1377)..(1377): n is a, c, g, or t
  misc_feature (1379)..(1379): n is a, c, g, or t
  misc_feature (1383)..(1383): n is a, c, g, or t
tagagaaattactatgagaggatcgcatcaccatcaccatcacggatcctatttaggtgacactatagaatcgtcgacccacgcgtccgcccacgcgtccgggcccactgagctgtccctggaggagctgagcatcagtgcccggcagcagcccaccccgctcaccccagcccagccagcccccgcccccgcccccgccaccaccacagggaccagggcagggggccacccggaggagccgctctcccggctcagccgcaagaggaagctcctggaggacacagagtcaggcaagacacttctgttggatgcctaccgtgtgtggcagcagggccagaagggtgtggcctatgacctgggccgtgtggagaggatcatgtcggagacctacatgctcatcaagcaggtggatgaggaggctgcgctggagcaggctgtgaagttctgccaggtccatcttggggctgctgcccagagacaggcctcgggggacacccccaccactccaaagcaccccaaagacagccgagagaacttctttcctgtgacagtggtgcccacagcccctgaccctgtgccagctgactctgtccagcggcccagtgatgctcacaccaagcctcgccctgcactagctgccgccacaactattatcacctgccctccgtcancatcagcttccaccctggaccagtccaaaggaccctggggcctccccggccacacaggcctgaagctacccccagcatggcctcttttgggcccaaagggaaaaataactggcgagagtggcaaagggcaccanntttcccgcctcaggannccannggcacantcccgcaggtgaaaaatngnccccaaaaatttccccggcaaaanncaaacttgnttgncctggcaaaaggcttgcccttgggnnanangncctttaaacccnaccttncaacccaannaagggaaanttnaagcnttnaancccaaaaaangnnngggggaangtttttnanttttnnaatntaaattnnnntcncttaaattttncccnaaannntgnanatnttnaatgntccttnntttnaattntncntnnnatnnaaattttcanctanntattattnnnntcnnnnntnnttntttattnnnccctttnncanaanttttaaaaantttnttntnnnttnnnntnntnnanannttcntcttntaaaannnnntnnnannannnnntanntntttnttntntnnttnnnnnnntnttntnnnntaaatnttntaattntnannnnnnttntnntttnannnttnnannnnnnttnnnanttttnnttnnnantnttttnanntnnnanntannnnnnnntntnnnnntanntnntntnttanttatt

SEQ ID NO: 440 - DNA, 1420 bp, Homo Sapiens
  misc_feature (925)..(925): n is a, c, g, or t
  misc_feature (934)..(934): n is a, c, g, or t
  misc_feature (980)..(980): n is a, c, g, or t
  misc_feature (983)..(983): n is a, c, g, or t
  misc_feature (995)..(995): n is a, c, g, or t
  misc_feature (1014)..(1014): n is a, c, g, or t
  misc_feature (1020)..(1020): n is a, c, g, or t
  misc_feature (1030)..(1030): n is a, c, g, or t
  misc_feature (1042)..(1042): n is a, c, g, or t
  misc_feature (1052)..(1052): n is a, c, g, or t
  misc_feature (1058)..(1058): n is a, c, g, or t
  misc_feature (1065)..(1065): n is a, c, g, or t
  misc_feature (1067)..(1067): n is a, c, g, or t
  misc_feature (1070)..(1070): n is a, c, g, or t
  misc_feature (1078)..(1079): n is a, c, g, or t
  misc_feature (1085)..(1085): n is a, c, g, or t
  misc_feature (1099)..(1101): n is a, c, g, or t
  misc_feature (1103)..(1103): n is a, c, g, or t
  misc_feature (1111)..(1111): n is a, c, g, or t
  misc_feature (1117)..(1117): n is a, c, g, or t
  misc_feature (1131)..(1131): n is a, c, g, or t
  misc_feature (1145)..(1145): n is a, c, g, or t
  misc_feature (1147)..(1147): n is a, c, g, or t
  misc_feature (1150)..(1150): n is a, c, g, or t
  misc_feature (1152)..(1152): n is a, c, g, or t
  misc_feature (1162)..(1163): n is a, c, g, or t
  misc_feature (1168)..(1168): n is a, c, g, or t
  misc_feature (1178)..(1178): n is a, c, g, or t
  misc_feature (1192)..(1192): n is a, c, g, or t
  misc_feature (1195)..(1197): n is a, c, g, or t
  misc_feature (1215)..(1216): n is a, c, g, or t
  misc_feature (1225)..(1226): n is a, c, g, or t
  misc_feature (1230)..(1230): n is a, c, g, or t
  misc_feature (1237)..(1237): n is a, c, g, or t
  misc_feature (1245)..(1245): n is a, c, g, or t
  misc_feature (1254)..(1254): n is a, c, g, or t
  misc_feature (1273)..(1273): n is a, c, g, or t
  misc_feature (1275)..(1275): n is a, c, g, or t
  misc_feature (1277)..(1277): n is a, c, g, or t
  misc_feature (1280)..(1281): n is a, c, g, or t
  misc_feature (1284)..(1286): n is a, c, g, or t
  misc_feature (1288)..(1288): n is a, c, g, or t
  misc_feature (1305)..(1305): n is a, c, g, or t
  misc_feature (1312)..(1312): n is a, c, g, or t
  misc_feature (1317)..(1317): n is a, c, g, or t
  misc_feature (1319)..(1319): n is a, c, g, or t
  misc_feature (1326)..(1326): n is a, c, g, or t
  misc_feature (1331)..(1332): n is a, c, g, or t
  misc_feature (1334)..(1334): n is a, c, g, or t
  misc_feature (1338)..(1338): n is a, c, g, or t
  misc_feature (1340)..(1340): n is a, c, g, or t
  misc_feature (1363)..(1365): n is a, c, g, or t
  misc_feature (1368)..(1368): n is a, c, g, or t
  misc_feature (1370)..(1370): n is a, c, g, or t
  misc_feature (1378)..(1379): n is a, c, g, or t
  misc_feature (1385)..(1385): n is a, c, g, or t
  misc_feature (1406)..(1406): n is a, c, g, or t
  misc_feature (1408)..(1409): n is a, c, g, or t
  misc_feature (1418)..(1418): n is a, c, g, or t
  misc_feature (1420)..(1420): n is a, c, g, or t
agaaattactatgagaggatcgcatcaccatcaccatcacggatcctatttaggtgacactatagaatcgtcgacccacgcgtccgagatgagtaaaatccctgcattggccgaagcatctttggatccagagaagcggctggggactccagagccctgctgcttatctgagtctgatttgtacctcaggagatactggggaggactccctggcttctgctggtaccagtatatcctgtaggtaccaacattgatgccactgcgtaaggtgcaggtgagactggctgatgctccaggagatgcagagagggaagacggctgagtcagcacagcctgcgagagggaacctggaaacacagacattaatgggtgctaaggcagaaaccagggtaaaatttttcagggatctttgccagaagagtcagaatcaggctgggtggctgaccctggtctctgaagtctattcctacctgtgcagtgagagaggaacaggaggaggagaggagtccaggccatggtggacacaacctcttacccccgcagtgggactgggctgccccaggcctccttttcttcccactgttgcagaggaggggttgctcatgcaaatgtgtttccacccagggactgccgggcccctccttgagacctggggatgcagctcagctctctctgcagactgagcaggaggaaggtttgcttttctttttgcaaggccctgggaggaagcacctgttgagaccatacacaggtccctgctcagggaactctgccaggccagaggggacacagctgccgagtgtccatcagtgagcacagggcccagcctcaaggcctggatttctctgagtgaatgctcattactgagcagctgtgtcggaaccacagggcaccccacaacatctgacgctggtcccagaaaacncactttccnaaagctcaaagacttcaaaacccagctggtctctgcagctctttantcnctggtctgtatncccatatccatgggctgantcctanaccctgcttnctatccatgctntggctttttnactacnaatttcncnccncccaaaannaatccntggtctgggggatnnncnaaacctgnacttcntaaactttttaaangggtccccccccancnggnanttttaaaaannttttncccccctttnttctccaaaggggnttnnnaaaagggtcccttaaaanntggtttaanncccnggttttncaaaaatngggaatagnaaatttccgaaaaaaaagntnangannttnnngncctttttttggaaacanggggggntccangncataaanaaaanntnggtngnggggggccccccttaaaaaaaannnttngngggggggnnccccgntgccccccccggattaaaaangnnccccccccngn

SEQ ID NO: 441 - DNA, 1345 bp, Homo Sapiens
  misc_feature (837)..(837): n is a, c, g, or t
  misc_feature (885)..(885): n is a, c, g, or t
  misc_feature (898)..(899): n is a, c, g, or t
  misc_feature (905)..(905): n is a, c, g, or t
  misc_feature (909)..(909): n is a, c, g, or t
  misc_feature (914)..(914): n is a, c, g, or t
  misc_feature (921)..(921): n is a, c, g, or t
  misc_feature (928)..(928): n is a, c, g, or t
  misc_feature (932)..(932): n is a, c, g, or t
  misc_feature (939)..(940): n is a, c, g, or t
  misc_feature (949)..(949): n is a, c, g, or t
  misc_feature (957)..(957): n is a, c, g, or t
  misc_feature (962)..(962): n is a, c, g, or t
  misc_feature (964)..(964): n is a, c, g, or t
  misc_feature (977)..(977): n is a, c, g, or t
  misc_feature (984)..(984): n is a, c, g, or t
  misc_feature (990)..(992): n is a, c, g, or t
  misc_feature (994)..(994): n is a, c, g, or t
  misc_feature (1003)..(1003): n is a, c, g, or t
  misc_feature (1008)..(1009): n is a, c, g, or t
  misc_feature (1014)..(1014): n is a, c, g, or t
  misc_feature (1021)..(1021): n is a, c, g, or t
  misc_feature (1023)..(1024): n is a, c, g, or t
  misc_feature (1026)..(1027): n is a, c, g, or t
  misc_feature (1035)..(1035): n is a, c, g, or t
  misc_feature (1037)..(1037): n is a, c, g, or t
  misc_feature (1044)..(1044): n is a, c, g, or t
  misc_feature (1047)..(1047): n is a, c, g, or t
  misc_feature (1049)..(1049): n is a, c, g, or t
  misc_feature (1053)..(1053): n is a, c, g, or t
  misc_feature (1063)..(1063): n is a, c, g, or t
  misc_feature (1068)..(1068): n is a, c, g, or t
  misc_feature (1070)..(1070): n is a, c, g, or t
  misc_feature (1080)..(1080): n is a, c, g, or t
  misc_feature (1082)..(1082): n is a, c, g, or t
  misc_feature (1084)..(1084): n is a, c, g, or t
  misc_feature (1094)..(1094): n is a, c, g, or t
  misc_feature (1102)..(1102): n is a, c, g, or t
  misc_feature (1105)..(1106): n is a, c, g, or t
  misc_feature (1112)..(1113): n is a, c, g, or t
  misc_feature (1115)..(1115): n is a, c, g, or t
  misc_feature (1122)..(1122): n is a, c, g, or t
  misc_feature (1126)..(1126): n is a, c, g, or t
  misc_feature (1128)..(1129): n is a, c, g, or t
  misc_feature (1132)..(1132): n is a, c, g, or t
  misc_feature (1134)..(1134): n is a, c, g, or t
  misc_feature (1136)..(1138): n is a, c, g, or t
  misc_feature (1140)..(1142): n is a, c, g, or t
  misc_feature (1146)..(1146): n is a, c, g, or t
  misc_feature (1151)..(1151): n is a, c, g, or t
  misc_feature (1155)..(1156): n is a, c, g, or t
  misc_feature (1162)..(1166): n is a, c, g, or t
  misc_feature (1169)..(1169): n is a, c, g, or t
  misc_feature (1172)..(1172): n is a, c, g, or t
  misc_feature (1174)..(1175): n is a, c, g, or t
  misc_feature (1183)..(1183): n is a, c, g, or t
  misc_feature (1190)..(1190): n is a, c, g, or t
  misc_feature (1197)..(1197): n is a, c, g, or t
  misc_feature (1201)..(1201): n is a, c, g, or t
  misc_feature (1208)..(1208): n is a, c, g, or t
  misc_feature (1210)..(1210): n is a, c, g, or t
  misc_feature (1214)..(1214): n is a, c, g, or t
  misc_feature (1218)..(1222): n is a, c, g, or t
  misc_feature (1224)..(1224): n is a, c, g, or t
  misc_feature (1226)..(1226): n is a, c, g, or t
  misc_feature (1228)..(1228): n is a, c, g, or t
  misc_feature (1230)..(1230): n is a, c, g, or t
  misc_feature (1234)..(1234): n is a, c, g, or t
  misc_feature (1240)..(1241): n is a, c, g, or t
  misc_feature (1243)..(1243): n is a, c, g, or t
  misc_feature (1247)..(1247): n is a, c, g, or t
  misc_feature (1250)..(1250): n is a, c, g, or t
  misc_feature (1253)..(1253): n is a, c, g, or t
  misc_feature (1255)..(1255): n is a, c, g, or t
  misc_feature (1258)..(1259): n is a, c, g, or t
  misc_feature (1262)..(1262): n is a, c, g, or t
  misc_feature (1264)..(1267): n is a, c, g, or t
  misc_feature (1269)..(1270): n is a, c, g, or t
  misc_feature (1272)..(1272): n is a, c, g, or t
  misc_feature (1274)..(1278): n is a, c, g, or t
  misc_feature (1284)..(1284): n is a, c, g, or t
  misc_feature (1286)..(1286): n is a, c, g, or t
  misc_feature (1293)..(1293): n is a, c, g, or t
  misc_feature (1299)..(1299): n is a, c, g, or t
  misc_feature (1309)..(1313): n is a, c, g, or t
  misc_feature (1319)..(1319): n is a, c, g, or t
  misc_feature (1321)..(1321): n is a, c, g, or t
  misc_feature (1326)..(1329): n is a, c, g, or t
  misc_feature (1333)..(1334): n is a, c, g, or t
  misc_feature (1336)..(1337): n is a, c, g, or t
  misc_feature (1339)..(1342): n is a, c, g, or t
  misc_feature (1345)..(1345): n is a, c, g, or t
aatagagaaattactatgagaggatcgcatcaccatcaccatcacgggatcctatttaggtgacactatagaatcgtcgacccacgcgtccgggctgagacgtcttcgtgccacggtgctgcctcctttccaagcgcgacccgttgaggtccttgtcatgcccagcctcagaactcgccgtgaggaggcagagatggagctctcagttccaggaccatccccctggacccctgcagcccaggcccgtgtgagagatgctcctgctgtgacccaccctggatctgcagcctgtggtaccccctgctgtagtgatactgagctggaagccatctgccctcactatcagcagccagattgtgacaccaggactgaagacaaggagtttcttcacaaggaagacattcatgaagatttggaatcacaggcagaaatatcagaaaactatgctggtgatgtttcccaggtacccgagcttggagatctgtgtgatgatgtatcagaaagagactggggagtccccgaaggcaggaggctgccacagtccctctcccaggagggggacttcacaccagctgccatggggctccttaggggccccttaggggagaaagatctggactgtaatggttttgacagtcgcttcagtctgagcccaaacctgatggcatgtcaggaaatccctacagaagagaggccacatccatatgacatgggtggccagagtttccagcacagtgtggacctaactggtcatgagggggttccccacagctgaaagtccactcatatgtaatgagtgtgggaaaacctttccaaggaaatcctgaccttattcancgtcaataatccacactgggggagcctccctttatgtgtgaagaatgngggaaaaccttcnnccaaantcanttctnaaaaccntccttcnatcncatatgnntgaaaaaancttaccantgcancnaatgggggaaaanccttccnaaggcnnncnaactttttntaggnntcaantcccccnanncnnggaaaagncntttattngtnangganggggaaaaanccttncnccccaaaatncnanctttaaaaanccccaaanttnncccatnngnggaaaancccntnnaangnannnannngggnaaagntttnngggggnnnnnaanccncnnccaaaatnaaaaaanccttttngggnaaaaaancntatntttnnnnnantngngnaaancctttnngnaaanttnaancnttnnaancnnnngnntncnnnnnaaaaancntttttgngggggngggggaaaannnnnccaaangnccccnnnnaaanncnnannnnccn

SEQ ID NO: 442 - DNA, 1395 bp, Homo Sapiens; identical to SEQ ID NO: 217
  misc_feature (936)..(936): n is a, c, g, or t
  misc_feature (965)..(965): n is a, c, g, or t
  misc_feature (967)..(968): n is a, c, g, or t
  misc_feature (991)..(991): n is a, c, g, or t
  misc_feature (1029)..(1029): n is a, c, g, or t
  misc_feature (1031)..(1031): n is a, c, g, or t
  misc_feature (1034)..(1034): n is a, c, g, or t
  misc_feature (1045)..(1045): n is a, c, g, or t
  misc_feature (1047)..(1047): n is a, c, g, or t
  misc_feature (1049)..(1049): n is a, c, g, or t
  misc_feature (1053)..(1053): n is a, c, g, or t
  misc_feature (1118)..(1118): n is a, c, g, or t
  misc_feature (1120)..(1120): n is a, c, g, or t
  misc_feature (1123)..(1124): n is a, c, g, or t
  misc_feature (1132)..(1132): n is a, c, g, or t
  misc_feature (1134)..(1134): n is a, c, g, or t
  misc_feature (1140)..(1140): n is a, c, g, or t
  misc_feature (1142)..(1142): n is a, c, g, or t
  misc_feature (1149)..(1149): n is a, c, g, or t
  misc_feature (1174)..(1174): n is a, c, g, or t
  misc_feature (1177)..(1178): n is a, c, g, or t
  misc_feature (1181)..(1181): n is a, c, g, or t
  misc_feature (1185)..(1185): n is a, c, g, or t
  misc_feature (1187)..(1187): n is a, c, g, or t
  misc_feature (1190)..(1191): n is a, c, g, or t
  misc_feature (1195)..(1195): n is a, c, g, or t
  misc_feature (1197)..(1197): n is a, c, g, or t
  misc_feature (1199)..(1199): n is a, c, g, or t
  misc_feature (1229)..(1229): n is a, c, g, or t
  misc_feature (1248)..(1248): n is a, c, g, or t
  misc_feature (1251)..(1251): n is a, c, g, or t
  misc_feature (1256)..(1257): n is a, c, g, or t
  misc_feature (1260)..(1260): n is a, c, g, or t
  misc_feature (1263)..(1265): n is a, c, g, or t
  misc_feature (1273)..(1273): n is a, c, g, or t
  misc_feature (1277)..(1277): n is a, c, g, or t
  misc_feature (1279)..(1279): n is a, c, g, or t
  misc_feature (1282)..(1282): n is a, c, g, or t
  misc_feature (1296)..(1296): n is a, c, g, or t
  misc_feature (1300)..(1300): n is a, c, g, or t
  misc_feature (1302)..(1302): n is a, c, g, or t
  misc_feature (1310)..(1310): n is a, c, g, or t
  misc_feature (1328)..(1328): n is a, c, g, or t
  misc_feature (1332)..(1332): n is a, c, g, or t
  misc_feature (1334)..(1334): n is a, c, g, or t
  misc_feature (1336)..(1337): n is a, c, g, or t
  misc_feature (1341)..(1341): n is a, c, g, or t
  misc_feature (1347)..(1348): n is a, c, g, or t
  misc_feature (1351)..(1352): n is a, c, g, or t
  misc_feature (1354)..(1354): n is a, c, g, or t
  misc_feature (1357)..(1361): n is a, c, g, or t
  misc_feature (1367)..(1367): n is a, c, g, or t
  misc_feature (1369)..(1369): n is a, c, g, or t
  misc_feature (1371)..(1371): n is a, c, g, or t
  misc_feature (1379)..(1380): n is a, c, g, or t
  misc_feature (1395)..(1395): n is a, c, g, or t

SEQ ID NO: 443 - DNA, 1374 bp, Homo Sapiens; identical to SEQ ID NO: 15
  misc_feature (730)..(730): n is a, c, g, or t
  misc_feature (747)..(747): n is a, c, g, or t
  misc_feature (751)..(751): n is a, c, g, or t
  misc_feature (754)..(754): n is a, c, g, or t
  misc_feature (758)..(758): n is a, c, g, or t
  misc_feature (761)..(761): n is a, c, g, or t
  misc_feature (764)..(764): n is a, c, g, or t
  misc_feature (778)..(778): n is a, c, g, or t
  misc_feature (783)..(783): n is a, c, g, or t
  misc_feature (787)..(787): n is a, c, g, or t
  misc_feature (794)..(794): n is a, c, g, or t
  misc_feature (802)..(802): n is a, c, g, or t
  misc_feature (805)..(805): n is a, c, g, or t
  misc_feature (835)..(835): n is a, c, g, or t
  misc_feature (837)..(837): n is a, c, g, or t
  misc_feature (845)..(845): n is a, c, g, or t
  misc_feature (848)..(850): n is a, c, g, or t
  misc_feature (859)..(859): n is a, c, g, or t
  misc_feature (863)..(866): n is a, c, g, or t
  misc_feature (875)..(875): n is a, c, g, or t
  misc_feature (880)..(883): n is a, c, g, or t
  misc_feature (885)..(885): n is a, c, g, or t
  misc_feature (888)..(888): n is a, c, g, or t
  misc_feature (890)..(890): n is a, c, g, or t
  misc_feature (894)..(896): n is a, c, g, or t
  misc_feature (902)..(902): n is a, c, g, or t
  misc_feature (904)..(904): n is a, c, g, or t
  misc_feature (906)..(906): n is a, c, g, or t
  misc_feature (914)..(915): n is a, c, g, or t
  misc_feature (917)..(918): n is a, c, g, or t
  misc_feature (921)..(921): n is a, c, g, or t
  misc_feature (923)..(928): n is a, c, g, or t
  misc_feature (931)..(935): n is a, c, g, or t
  misc_feature (938)..(939): n is a, c, g, or t
  misc_feature (942)..(942): n is a, c, g, or t
  misc_feature (945)..(947): n is a, c, g, or t
  misc_feature (949)..(949): n is a, c, g, or t
  misc_feature (953)..(954): n is a, c, g, or t
  misc_feature (956)..(956): n is a, c, g, or t
  misc_feature (961)..(961): n is a, c, g, or t
  misc_feature (963)..(963): n is a, c, g, or t
  misc_feature (971)..(973): n is a, c, g, or t
  misc_feature (977)..(977): n is a, c, g, or t
  misc_feature (982)..(983): n is a, c, g, or t
  misc_feature (985)..(986): n is a, c, g, or t
  misc_feature (989)..(990): n is a, c, g, or t
  misc_feature (994)..(995): n is a, c, g, or t
  misc_feature (997)..(997): n is a, c, g, or t
  misc_feature (1001)..(1006): n is a, c, g, or t
  misc_feature (1008)..(1008): n is a, c, g, or t
  misc_feature (1010)..(1011): n is a, c, g, or t
  misc_feature (1015)..(1015): n is a, c, g, or t
  misc_feature (1020)..(1020): n is a, c, g, or t
  misc_feature (1024)..(1024): n is a, c, g, or t
  misc_feature (1027)..(1027): n is a, c, g, or t
  misc_feature (1032)..(1034): n is a, c, g, or t
  misc_feature (1038)..(1039): n is a, c, g, or t
  misc_feature (1041)..(1041): n is a, c, g, or t
  misc_feature (1044)..(1045): n is a, c, g, or t
  misc_feature (1047)..(1048): n is a, c, g, or t
  misc_feature (1051)..(1051): n is a, c, g, or t
  misc_feature (1053)..(1053): n is a, c, g, or t
  misc_feature (1055)..(1055): n is a, c, g, or t
  misc_feature (1059)..(1059): n is a, c, g, or t
  misc_feature (1063)..(1069): n is a, c, g, or t
  misc_feature (1075)..(1076): n is a, c, g, or t
  misc_feature (1080)..(1080): n is a, c, g, or t
  misc_feature (1082)..(1083): n is a, c, g, or t
  misc_feature (1086)..(1086): n is a, c, g, or t
  misc_feature (1088)..(1108): n is a, c, g, or t
  misc_feature (1110)..(1111): n is a, c, g, or t
  misc_feature (1113)..(1116): n is a, c, g, or t
  misc_feature (1119)..(1119): n is a, c, g, or t
  misc_feature (1121)..(1124): n is a, c, g, or t
  misc_feature (1126)..(1127): n is a, c, g, or t
  misc_feature (1129)..(1132): n is a, c, g, or t
  misc_feature (1134)..(1135): n is a, c, g, or t
  misc_feature (1137)..(1138): n is a, c, g, or t
  misc_feature (1141)..(1144): n is a, c, g, or t
  misc_feature (1146)..(1149): n is a, c, g, or t
  misc_feature (1157)..(1157): n is a, c, g, or t
  misc_feature (1162)..(1163): n is a, c, g, or t
  misc_feature (1165)..(1165): n is a, c, g, or t
  misc_feature (1167)..(1171): n is a, c, g, or t
  misc_feature (1175)..(1176): n is a, c, g, or t
  misc_feature (1178)..(1194): n is a, c, g, or t
  misc_feature (1196)..(1199): n is a, c, g, or t
  misc_feature (1201)..(1205): n is a, c, g, or t
  misc_feature (1207)..(1209): n is a, c, g, or t
  misc_feature (1213)..(1215): n is a, c, g, or t
  misc_feature (1217)..(1228): n is a, c, g, or t
  misc_feature (1230)..(1249): n is a, c, g, or t
  misc_feature (1252)..(1290): n is a, c, g, or t
  misc_feature (1292)..(1332): n is a, c, g, or t
  misc_feature (1334)..(1372): n is a, c, g, or t

SEQ ID NO: 444 - DNA, 1200 bp, Homo Sapiens
  misc_feature (795)..(796): n is a, c, g, or t
  misc_feature (808)..(808): n is a, c, g, or t
  misc_feature (810)..(810): n is a, c, g, or t
  misc_feature (813)..(817): n is a, c, g, or t
  misc_feature (819)..(819): n is a, c, g, or t
  misc_feature (821)..(822): n is a, c, g, or t
  misc_feature (825)..(825): n is a, c, g, or t
  misc_feature (828)..(829): n is a, c, g, or t
  misc_feature (833)..(834): n is a, c, g, or t
  misc_feature (836)..(836): n is a, c, g, or t
  misc_feature (860)..(860): n is a, c, g, or t
  misc_feature (889)..(889): n is a, c, g, or t
  misc_feature (893)..(893): n is a, c, g, or t
  misc_feature (898)..(898): n is a, c, g, or t
  misc_feature (901)..(901): n is a, c, g, or t
  misc_feature (911)..(911): n is a, c, g, or t
  misc_feature (920)..(920): n is a, c, g, or t
  misc_feature (936)..(936): n is a, c, g, or t
  misc_feature (938)..(938): n is a, c, g, or t
  misc_feature (943)..(943): n is a, c, g, or t
  misc_feature (961)..(961): n is a, c, g, or t
  misc_feature (967)..(967): n is a, c, g, or t
  misc_feature (974)..(975): n is a, c, g, or t
  misc_feature (981)..(982): n is a, c, g, or t
  misc_feature (989)..(989): n is a, c, g, or t
  misc_feature (1008)..(1008): n is a, c, g, or t
  misc_feature (1012)..(1012): n is a, c, g, or t
  misc_feature (1021)..(1021): n is a, c, g, or t
  misc_feature (1023)..(1023): n is a, c, g, or t
  misc_feature (1029)..(1029): n is a, c, g, or t
  misc_feature (1039)..(1039): n is a, c, g, or t
  misc_feature (1041)..(1041): n is a, c, g, or t
  misc_feature (1048)..(1048): n is a, c, g, or t
  misc_feature (1063)..(1065): n is a, c, g, or t
  misc_feature (1073)..(1073): n is a, c, g, or t
  misc_feature (1080)..(1080): n is a, c, g, or t
  misc_feature (1084)..(1084): n is a, c, g, or t
  misc_feature (1087)..(1088): n is a, c, g, or t
  misc_feature (1091)..(1091): n is a, c, g, or t
  misc_feature (1105)..(1105): n is a, c, g, or t
  misc_feature (1121)..(1121): n is a, c, g, or t
  misc_feature (1130)..(1131): n is a, c, g, or t
  misc_feature (1134)..(1134): n is a, c, g, or t
  misc_feature (1138)..(1138): n is a, c, g, or t
  misc_feature (1140)..(1140): n is a, c, g, or t
  misc_feature (1146)..(1148): n is a, c, g, or t
  misc_feature (1153)..(1153): n is a, c, g, or t
  misc_feature (1162)..(1162): n is a, c, g, or t
  misc_feature (1165)..(1165): n is a, c, g, or t
  misc_feature (1168)..(1168): n is a, c, g, or t
  misc_feature (1170)..(1170): n is a, c, g, or t
  misc_feature (1172)..(1172): n is a, c, g, or t
  misc_feature (1178)..(1178): n is a, c, g, or t
  misc_feature (1183)..(1184): n is a, c, g, or t
  misc_feature (1193)..(1193): n is a, c, g, or t
  misc_feature (1196)..(1196): n is a, c, g, or t
tagagaaattaactatgagaggatcgcatcaccattcaccatcacggatcctatttaggtgacactatagaatcgtcgacccacgcgtccgcccacgcgtccgccagctgcccaccctctggacattcacccagccaggtggtctcgtcacctcagaggctccgccagactcctgcccaggccaggactgaggcaagcctcaaggcacttctaggacctgcctcttctcaccaagatgaactcactggtttcttggcagctactgcttttcctctgtgccacccactttggggagccattagaaaaggtggcctctgtggggaattctagacccacaggccagcagctagaatccctgggcctcctggcccccggggagcagagcctgccgtgcaccgagaggaagccagctgctactgccaggctgagccgtcgggggacctcgctgtccccgccccccgagagctccgggagcccccagcagccgggcctgtccgccccccacagccgccagatccccgcaccccagggcgcggtgctggtgcagcgggagaaggacctgccgaactacaactggaactccttcggcctgcgcttcggcaagcgggaggcggcaccagggaaccacggcagaagcgctgggcggggctgagggcgcaggtgcggggcagtgaacttcagaccccaaaggagtcagagcatgcggggcgggggcggggggcggggacgtagggctaagggagggggcgctggagcttccaacccgaggcaataaaagaaatgttgcgtaactcnnaaaaaaaaaaananaannnnnanannaanaannttanntnaaaagggcgggccgcttcccttanagtgaagtcgtaattaaacttaaattaantgancttgnaantcctgttganaaaatccanttaatgacctcaaaantncctcntggaatttgtttaaaaancctcgntttgccnnccgggnnttttttnttggggaaaaatccaaacntagnttggggaananttttcnggagctaagnancttaaantggaaaaaaaaaatnnntggaaaanacccccntttnaannttnccattgggattctnaaaaaaaatttttganggattttannccntttngnccaagnnnccttnaaacaaaancgnttnangnaaattnaggcnnttttaaaancgnaaaa

SEQ ID NO: 445 - DNA, 1189 bp, Homo Sapiens
  misc_feature (895)..(895): n is a, c, g, or t
  misc_feature (908)..(908): n is a, c, g, or t
  misc_feature (913)..(913): n is a, c, g, or t
  misc_feature (922)..(922): n is a, c, g, or t
  misc_feature (928)..(928): n is a, c, g, or t
  misc_feature (974)..(974): n is a, c, g, or t
  misc_feature (981)..(981): n is a, c, g, or t
  misc_feature (1025)..(1025): n is a, c, g, or t
  misc_feature (1031)..(1031): n is a, c, g, or t
  misc_feature (1073)..(1073): n is a, c, g, or t
  misc_feature (1084)..(1084): n is a, c, g, or t
  misc_feature (1087)..(1087): n is a, c, g, or t
  misc_feature (1095)..(1095): n is a, c, g, or t
  misc_feature (1103)..(1103): n is a, c, g, or t
  misc_feature (1122)..(1122): n is a, c, g, or t
  misc_feature (1132)..(1132): n is a, c, g, or t
  misc_feature (1136)..(1136): n is a, c, g, or t
  misc_feature (1142)..(1142): n is a, c, g, or t
  misc_feature (1150)..(1150): n is a, c, g, or t
  misc_feature (1153)..(1153): n is a, c, g, or t
  misc_feature (1157)..(1157): n is a, c, g, or t
  misc_feature (1161)..(1161): n is a, c, g, or t
  misc_feature (1163)..(1164): n is a, c, g, or t
  misc_feature (1166)..(1166): n is a, c, g, or t
  misc_feature (1178)..(1178): n is a, c, g, or t
  misc_feature (1180)..(1180): n is a, c, g, or t
  misc_feature (1188)..(1188): n is a, c, g, or t
tagagaaattactatgagaggatcgcatcaccatcaccatcacggatcctatttaggtgacactatagaatcgtcgacccacgcgtccgcccacgcgtccgcaggtgcaatcgtggaataccacgggcctggtgtagactccatctcctgcactggcatggcgacaatctgcaacatgggtgcagaaattggggccaccacttccgtgttcccttacaaccacaggatgaagaagtacctgagcaagaccggccgggaagacattgccaatctagctgatgaattcaaggatcacttggtgcctgaccctggctgccattatgaccaactaattgaaattaacctcagtgagctgaagccacacatcaatgggcccttcacccctgacctggctcaccctgtggcagaagtgggcaaggtggcagagaaggaaggatggcctctggacatccgagtgggtctaattggtagctgcaccaattcaagctatgaagatatggggcgctcagcagctgtggccaagcaggcactggcccatggcctcaagtgcaagtcccagttcaccatcactccaggttccgagcagatccgcgccaccattgagcgggacggctatgcacagatcttgagggatctgggtggcattgtcctggccaatgcttgtggcccctgcattggccagtgggacaggaaggacatcaagaagggggagaagaacacaatcgtcacctcctacaacaggaacttcacgggccgcaacgacgcaaaccccgagacccatgcctttgtcacgtccccagagattgtcacagccctggccattgcgggaaccctcaagttcaacccaaagaccgactacctgacgggcacggatggcaaaaagttcaggctggangctccggatgcanatgancttcccaangggaantttgacccagggcaggacacctacagcacccacccaaggacagcancgggcancatgtggacgtgagccccacagccagcgcctgcagctcctggancctttnacaagtgggaatggcaaggacctggagaacttgcaaatctcntcaaggtcaanggnaatgtacnctgaccantttcactggtggccctggntcaattccgngggnccttgnaaaaattntcnaaanctgntnntngggccctcaaantnaaaaaggna

SEQ ID NO: 446 - DNA, 923 bp, Homo Sapiens
attattaaaagaagaagaaattatctatgagaggatcgcatcaccatcaccatcacggatcctatttaggtgacaccaaagaatcgtcgacccacgcgtccgccgggggcggagcgggatctagccctcgccgaggcctgccgccatgggcccgcgccgccgccgccgcctgtcacccgggccgcgcgggccgtgagcgtcatggccttggccggggcccctgcgggcggcccatgcgcgccggcgctggaggccctgctcggggccggcgcgctgcggctgctcgactcctcgcagatcctcatcatctccgccgcgcaggacgccagcgccccgccggctcccaccggccccgcggcgcccgccgccggcccctgcgaccctgacctgctgctcttcgccacaccgcaggcgccccggcccacacccagtgcgccgcggcccgcgctcggccgcccgccggtgaagcggaggctggacctggaaactgaccatcagtacctggccgaaagcagtgggccagctcggggcagaggccgccatccaggaaaaggtgtgaaatccccgggggagaagtcacgctatgagacctcactgaatctgaccaccaagcgcttcctggagctgctgagccactcggctgacggtgtcgtcgacctgaactgggctgccgaggtgctgaaggtgcataagcggcgcatctatgacatcaccaacgtccttgagggcatccagctcattgccaagaagtccaagaaccacatccagtggctgggcagccacaccacagtgggcgtctgcggacggcttgaggggttgacccaggatctccgacagctgcaggagagcgagcagcatctggaccatctgatgtatattctgtactacgcagctgcgccttgctcttccgaggacactgacat

SEQ ID NO: 447 - DNA, 1200 bp, Homo Sapiens
  misc_feature (791)..(791): n is a, c, g, or t
  misc_feature (806)..(806): n is a, c, g, or t
  misc_feature (833)..(833): n is a, c, g, or t
  misc_feature (857)..(857): n is a, c, g, or t
  misc_feature (864)..(864): n is a, c, g, or t
  misc_feature (867)..(867): n is a, c, g, or t
  misc_feature (869)..(869): n is a, c, g, or t
  misc_feature (874)..(874): n is a, c, g, or t
  misc_feature (876)..(876): n is a, c, g, or t
  misc_feature (879)..(879): n is a, c, g, or t
  misc_feature (885)..(885): n is a, c, g, or t
  misc_feature (891)..(891): n is a, c, g, or t
  misc_feature (905)..(905): n is a, c, g, or t
  misc_feature (914)..(914): n is a, c, g, or t
  misc_feature (923)..(923): n is a, c, g, or t
  misc_feature (926)..(926): n is a, c, g, or t
  misc_feature (928)..(928): n is a, c, g, or t
  misc_feature (931)..(931): n is a, c, g, or t
  misc_feature (941)..(941): n is a, c, g, or t
  misc_feature (943)..(943): n is a, c, g, or t
  misc_feature (946)..(946): n is a, c, g, or t
  misc_feature (948)..(948): n is a, c, g, or t
  misc_feature (951)..(951): n is a, c, g, or t
  misc_feature (953)..(953): n is a, c, g, or t
  misc_feature (969)..(969): n is a, c, g, or t
  misc_feature (971)..(971): n is a, c, g, or t
  misc_feature (975)..(975): n is a, c, g, or t
  misc_feature (978)..(978): n is a, c, g, or t
  misc_feature (980)..(980): n is a, c, g, or t
  misc_feature (988)..(988): n is a, c, g, or t
  misc_feature (992)..(992): n is a, c, g, or t
  misc_feature (1001)..(1001): n is a, c, g, or t
  misc_feature (1012)..(1013): n is a, c, g, or t
  misc_feature (1016)..(1016): n is a, c, g, or t
  misc_feature (1019)..(1019): n is a, c, g, or t
  misc_feature (1022)..(1022): n is a, c, g, or t
  misc_feature (1024)..(1025): n is a, c, g, or t
  misc_feature (1027)..(1027): n is a, c, g, or t
  misc_feature (1033)..(1033): n is a, c, g, or t
  misc_feature (1038)..(1038): n is a, c, g, or t
  misc_feature (1040)..(1042): n is a, c, g, or t
  misc_feature (1045)..(1045): n is a, c, g, or t
  misc_feature (1047)..(1047): n is a, c, g, or t
  misc_feature (1051)..(1051): n is a, c, g, or t
  misc_feature (1053)..(1053): n is a, c, g, or t
  misc_feature (1055)..(1055): n is a, c, g, or t
  misc_feature (1059)..(1059): n is a, c, g, or t
  misc_feature (1065)..(1065): n is a, c, g, or t
  misc_feature (1068)..(1068): n is a, c, g, or t
  misc_feature (1071)..(1071): n is a, c, g, or t
  misc_feature (1077)..(1083): n is a, c, g, or t
  misc_feature (1085)..(1085): n is a, c, g, or t
  misc_feature (1090)..(1091): n is a, c, g, or t
  misc_feature (1095)..(1095): n is a, c, g, or t
  misc_feature (1099)..(1099): n is a, c, g, or t
  misc_feature (1102)..(1103): n is a, c, g, or t
  misc_feature (1113)..(1114): n is a, c, g, or t
  misc_feature (1116)..(1116): n is a, c, g, or t
  misc_feature (1125)..(1125): n is a, c, g, or t
  misc_feature (1127)..(1128): n is a, c, g, or t
  misc_feature (1130)..(1130): n is a, c, g, or t
  misc_feature (1147)..(1147): n is a, c, g, or t
  misc_feature (1154)..(1154): n is a, c, g, or t
  misc_feature (1158)..(1159): n is a, c, g, or t
  misc_feature (1162)..(1162): n is a, c, g, or t
  misc_feature (1167)..(1167): n is a, c, g, or t
  misc_feature (1170)..(1172): n is a, c, g, or t
  misc_feature (1174)..(1174): n is a, c, g, or t
  misc_feature (1178)..(1178): n is a, c, g, or t
  misc_feature (1180)..(1181): n is a, c, g, or t
  misc_feature (1183)..(1184): n is a, c, g, or t
  misc_feature (1190)..(1190): n is a, c, g, or t
  misc_feature (1194)..(1195): n is a, c, g, or t
  misc_feature (1198)..(1198): n is a, c, g, or t
  misc_feature (1200)..(1200): n is a, c, g, or t
agagagaattactatgagaggatcgcatcaccatcaccatcacggatcctatttaggtgacactatagaatcgtcgacccacgcgtccgctggcacagatccgcgatgcccggggggcgctgagtgccctgcgcgaagagcaccgggagaagcttcgccgggcagccgaggaggcagagcgccagcgccagatccagctggcccagaagctggagataatgcggcagaagaagcaggagtacctggaggtgcagaggcagctggccatccagcgcctgcaggagcaggagaaggagcggcagatgcggctggagcagcagaagcagacggtccagatgcgcgcgcagatgcccgccttccccctgccctacgcccagctccaggccatgcccgcagccggaggtgtgctctaccagccctcgggaccagccagcttccccagcaccttcagccccgccggctcggtggagggctccccaatgcacggcgtgtacatgagccagccggcccctgccgctggcccctaccccagcatgcccagcactgcggctgatcccagcatggtgagtgcctacatgtacccagcaggggccactggggcgcaggcggccccccaggcccaggccggacccaccgccagccccgcttactcatcctaccagcctactcccacagcgggctaccagaacgtggcctcccaggccccacagagcctcccggccatctctcagcctccgcagtccagcaccatgggctacatggggagccagtcagtctccatgggctaccanccttacaacatgcanaatctcatgaccaccctcccaagccangatgcgtctctgccaccccagcancccttanatngnggggnancancccatntaccancaaatggcaccctntgggggttnccccccaanaananccncccgtggccnanaancncangnaaaggggccccccggnanaggnaancnaggcccantttnttttttttnaattgaaccannccntgnttnanntncggaantaaantnnnttnantttncntnaaancccttnttnttnaaatgnnnnnnncntgccnncctngtcnttnntggggggaanntnccttttttngnnantgaggggggggcttttnccccaancccnnttnctttnttnnnancttntnnanncccttnaatnnttntn

SEQ ID NO: 448 - DNA, 1110 bp, Homo Sapiens
tatctaaagaaagggaattaactatgagaggtcgcatcaccatcaccatcacggatcctatttaggtgacactatagaatcgtcgacccacgcgtccggcttgctgtgactgtctctagggagatacgtgggtgaaagaggtcctggcccccccccaaaccccctgcgcctcgccgccatgcctcggaaaaatgaggaaatctcggacttcctggtcacagcccgacgaaaggatgccaaatctgtcaagatcaaaaaaaatgaggacaacgggaagtttaatgttcgatgccccaaattgctttacaccctgggcctcactgacaaagagaaggcagagaaactgaagcagaccctgccccccggtttggcagtgaaggaactgaaatgaaccatacaccctgattggaactgtattatattaagatactaaaaatcctaagtgcctttcgtctttgcggatgggaaagggaaaaatgctacctcgtagtggcttctgatgggaacaggacgcgagttctgttgctgccttcctgtgtctttttttttttttttttttctttctttgagacggactcttgctctgtggctcatcctggagcacagaggtgcgataacccctgactaccacctccgcctcctgggttcaagcgactgtcctgcctcagcctcccgagttgctggtgttacaggcgcccgactccgccccagccttcttttttgtatattgtagagagacagggtttcctgcctgcttcaccctcccctactgctgggattacaggttcgagcctctttgccccgtgcatccctactcttgaccaagatgtctctctggacatgatgccagctgttttcgcctgtttgaaaataagatgtggggaggccatgatggaaaatagcacgtggggttaaacataactggcagatgtggaagcggatggcgcgcgccctgccattcaaacaagttcccataatgggttgcaacaatgtatagctcatctaccactcgctaactcgactgacttgcaagaagtgactgactcattatgcctgtttcctcacgtggaaattgtcattattgaacaacctcttttcattggcgtgcag

SEQ ID NO: 449 - DNA, 1198 bp, Homo Sapiens; identical to SEQ ID NO: 247
  misc_feature (866)..(866): n is a, c, g, or t
  misc_feature (992)..(992): n is a, c, g, or t
  misc_feature (994)..(994): n is a, c, g, or t
  misc_feature (1011)..(1011): n is a, c, g, or t
  misc_feature (1016)..(1016): n is a, c, g, or t
  misc_feature (1020)..(1020): n is a, c, g, or t
  misc_feature (1026)..(1027): n is a, c, g, or t
  misc_feature (1029)..(1029): n is a, c, g, or t
  misc_feature (1048)..(1048): n is a, c, g, or t
  misc_feature (1050)..(1050): n is a, c, g, or t
  misc_feature (1057)..(1057): n is a, c, g, or t
  misc_feature (1068)..(1068): n is a, c, g, or t
  misc_feature (1075)..(1075): n is a, c, g, or t
  misc_feature (1077)..(1077): n is a, c, g, or t
  misc_feature (1081)..(1081): n is a, c, g, or t
  misc_feature (1087)..(1087): n is a, c, g, or t
  misc_feature (1095)..(1095): n is a, c, g, or t
  misc_feature (1097)..(1097): n is a, c, g, or t
  misc_feature (1102)..(1102): n is a, c, g, or t
  misc_feature (1110)..(1110): n is a, c, g, or t
  misc_feature (1127)..(1128): n is a, c, g, or t
  misc_feature (1131)..(1131): n is a, c, g, or t
  misc_feature (1133)..(1133): n is a, c, g, or t
  misc_feature (1152)..(1152): n is a, c, g, or t
  misc_feature (1156)..(1156): n is a, c, g, or t
  misc_feature (1170)..(1170): n is a, c, g, or t
  misc_feature (1176)..(1176): n is a, c, g, or t
  misc_feature (1181)..(1181): n is a, c, g, or t
  misc_feature (1183)..(1183): n is a, c, g, or t
  misc_feature (1186)..(1188): n is a, c, g, or t
  misc_feature (1194)..(1194): n is a, c, g, or t
  misc_feature (1198)..(1198): n is a, c, g, or t

SEQ ID NO: 450 - DNA, 1200 bp, Homo Sapiens
  misc_feature (5)..(5): n is a, c, g, or t
  misc_feature (7)..(8): n is a, c, g, or t
  misc_feature (13)..(13): n is a, c, g, or t
  misc_feature (21)..(23): n is a, c, g, or t
  misc_feature (26)..(26): n is a, c, g, or t
  misc_feature (28)..(28): n is a, c, g, or t
  misc_feature (33)..(33): n is a, c, g, or t
  misc_feature (38)..(38): n is a, c, g, or t
  misc_feature (53)..(53): n is a, c, g, or t
  misc_feature (55)..(55): n is a, c, g, or t
  misc_feature (58)..(58): n is a, c, g, or t
  misc_feature (62)..(62): n is a, c, g, or t
  misc_feature (92)..(92): n is a, c, g, or t
  misc_feature (100)..(100): n is a, c, g, or t
  misc_feature (112)..(112): n is a, c, g, or t
  misc_feature (115)..(115): n is a, c, g, or t
  misc_feature (595)..(595): n is a, c, g, or t
  misc_feature (740)..(740): n is a, c, g, or t
  misc_feature (814)..(814): n is a, c, g, or t
  misc_feature (823)..(823): n is a, c, g, or t
  misc_feature (886)..(886): n is a, c, g, or t
  misc_feature (896)..(896): n is a, c, g, or t
  misc_feature (900)..(900): n is a, c, g, or t
  misc_feature (902)..(902): n is a, c, g, or t
  misc_feature (904)..(904): n is a, c, g, or t
  misc_feature (916)..(916): n is a, c, g, or t
  misc_feature (922)..(922): n is a, c, g, or t
  misc_feature (925)..(925): n is a, c, g, or t
  misc_feature (931)..(931): n is a, c, g, or t
  misc_feature (938)..(939): n is a, c, g, or t
  misc_feature (947)..(947): n is a, c, g, or t
  misc_feature (965)..(965): n is a, c, g, or t
  misc_feature (975)..(975): n is a, c, g, or t
  misc_feature (980)..(980): n is a, c, g, or t
  misc_feature (987)..(987): n is a, c, g, or t
  misc_feature (990)..(990): n is a, c, g, or t
  misc_feature (998)..(998): n is a, c, g, or t
  misc_feature (1004)..(1004): n is a, c, g, or t
  misc_feature (1011)..(1012): n is a, c, g, or t
  misc_feature (1014)..(1014): n is a, c, g, or t
  misc_feature (1027)..(1027): n is a, c, g, or t
  misc_feature (1034)..(1034): n is a, c, g, or t
  misc_feature (1036)..(1036): n is a, c, g, or t
  misc_feature (1038)..(1038): n is a, c, g, or t
  misc_feature (1053)..(1053): n is a, c, g, or t
  misc_feature (1056)..(1056): n is a, c, g, or t
  misc_feature (1068)..(1068): n is a, c, g, or t
  misc_feature (1074)..(1074): n is a, c, g, or t
  misc_feature (1077)..(1077): n is a, c, g, or t
  misc_feature (1080)..(1080): n is a, c, g, or t
  misc_feature (1085)..(1085): n is a, c, g, or t
  misc_feature (1087)..(1087): n is a, c, g, or t
  misc_feature (1090)..(1090): n is a, c, g, or t
  misc_feature (1095)..(1095): n is a, c, g, or t
  misc_feature (1100)..(1100): n is a, c, g, or t
  misc_feature (1103)..(1103): n is a, c, g, or t
  misc_feature (1115)..(1115): n is a, c, g, or t
  misc_feature (1120)..(1120): n is a, c, g, or t
  misc_feature (1124)..(1124): n is a, c, g, or t
  misc_feature (1128)..(1128): n is a, c, g, or t
  misc_feature (1133)..(1133): n is a, c, g, or t
  misc_feature (1136)..(1137): n is a, c, g, or t
  misc_feature (1140)..(1141): n is a, c, g, or t
  misc_feature (1147)..(1149): n is a, c, g, or t
  misc_feature (1161)..(1163): n is a, c, g, or t
  misc_feature (1165)..(1166): n is a, c, g, or t
  misc_feature (1173)..(1173): n is a, c, g, or t
  misc_feature (1180)..(1180): n is a, c, g, or t
  misc_feature (1183)..(1183): n is a, c, g, or t
  misc_feature (1189)..(1189): n is a, c, g, or t
  misc_feature (1194)..(1194): n is a, c, g, or t
  misc_feature (1198)..(1198): n is a, c, g, or t
aggantnnaacanaattagcnnngantnggatngcgancctcgtcatccactnangtnatcnctatttaggggtgacatgtaatattaatcnttaacccncgtcgctccggnagnaaggtagcccgcagtaggaacatggcgctgctctgggggctcctggtgctcagctggtcctgcctgcaaggcccctgctccgtgttctcccctgtgagcgccatggagcccttgggccggcagctaactagcgggccgaaccaggagcaggtgtccccacttaccctcctcaagttgggcaaccaggagcctggtggccagactgccctgaagagtcccccaggagtctgcagcagagaccccaccccagagcagacccacaggctggcccgggccatgatggccttcactgccgacctgttctccctggtggctcaaacgtccacctgccccaacctcatcctgtcacccctgagtgtggccctggcgctgtctcacctggcactaggtgctcagaaccacacgttgcagaggctgcaacaggtgctgcacgcaggctcagggccctgcctcccccatctgctgagccgcctctgccangacctgggccccggcgcgttccgactggctgccaggatgtacctgcagaaaggatttcccatcaaagaagatttcctggaacaatccgaacagctatttggggcaaagcccgtgagcctgacgggaaagcaggaagatgacctgncaaacatcaaccaatgggtgaaaggaggccacggaggggaaagattcaggaattcctctctgggctgccggaanacaccgtgnttgcttctcctcaacgccatccactttccagggttttctggaggaacaaagttttgacccgangccttacccnaganananttccttccaccntggaanaancatttncacggtnncccgtggnaaatgatgcaaggccccncacgtacccnctgcnctggttnttngctggaancaaccntgaaaanncnaaggtcccccttnggttgtncnancaaggcttggccctnaanttggaaggtggnaaaagnaanggnaaaangnttntgaancaagncanaaggaaatgggngggangctntttnccccnttnnttnncctccnnntccccctaaggnnngnnaaattcnaaaaggnccnctgganccccnatcnaa

SEQ ID NO: 451 - DNA, 1200 bp, Homo Sapiens; identical to SEQ ID NO: 152
  misc_feature (14)..(14): n is a, c, g, or t
  misc_feature (953)..(953): n is a, c, g, or t
  misc_feature (963)..(963): n is a, c, g, or t
  misc_feature (985)..(985): n is a, c, g, or t
  misc_feature (987)..(987): n is a, c, g, or t
  misc_feature (1015)..(1015): n is a, c, g, or t
  misc_feature (1021)..(1021): n is a, c, g, or t
  misc_feature (1023)..(1023): n is a, c, g, or t
  misc_feature (1026)..(1026): n is a, c, g, or t
  misc_feature (1037)..(1037): n is a, c, g, or t
  misc_feature (1045)..(1045): n is a, c, g, or t
  misc_feature (1050)..(1050): n is a, c, g, or t
  misc_feature (1060)..(1060): n is a, c, g, or t
  misc_feature (1069)..(1069): n is a, c, g, or t
  misc_feature (1074)..(1074): n is a, c, g, or t
  misc_feature (1081)..(1081): n is a, c, g, or t
  misc_feature (1088)..(1088): n is a, c, g, or t
  misc_feature (1102)..(1102): n is a, c, g, or t
  misc_feature (1106)..(1106): n is a, c, g, or t
  misc_feature (1114)..(1114): n is a, c, g, or t
  misc_feature (1116)..(1116): n is a, c, g, or t
  misc_feature (1122)..(1122): n is a, c, g, or t
  misc_feature (1126)..(1126): n is a, c, g, or t
  misc_feature (1133)..(1133): n is a, c, g, or t
  misc_feature (1135)..(1135): n is a, c, g, or t
  misc_feature (1137)..(1138): n is a, c, g, or t
  misc_feature (1142)..(1142): n is a, c, g, or t
  misc_feature (1146)..(1146): n is a, c, g, or t
  misc_feature (1158)..(1158): n is a, c, g, or t
  misc_feature (1161)..(1161): n is a, c, g, or t
  misc_feature (1163)..(1163): n is a, c, g, or t
  misc_feature (1168)..(1168): n is a, c, g, or t
  misc_feature (1170)..(1171): n is a, c, g, or t
  misc_feature (1174)..(1174): n is a, c, g, or t

SEQ ID NO: 452 - DNA, 1200 bp, Homo Sapiens
  misc_feature (5)..(5): n is a, c, g, or t
  misc_feature (32)..(32): n is a, c, g, or t
  misc_feature (72)..(72): n is a, c, g, or t
  misc_feature (90)..(90): n is a, c, g, or t
  misc_feature (191)..(191): n is a, c, g, or t
  misc_feature (247)..(247): n is a, c, g, or t
  misc_feature (282)..(282): n is a, c, g, or t
  misc_feature (292)..(292): n is a, c, g, or t
  misc_feature (295)..(295): n is a, c, g, or t
  misc_feature (301)..(301): n is a, c, g, or t
  misc_feature (383)..(383): n is a, c, g, or t
  misc_feature (437)..(437): n is a, c, g, or t
  misc_feature (442)..(442): n is a, c, g, or t
  misc_feature (454)..(454): n is a, c, g, or t
  misc_feature (466)..(466): n is a, c, g, or t
  misc_feature (507)..(507): n is a, c, g, or t
  misc_feature (511)..(511): n is a, c, g, or t
  misc_feature (514)..(514): n is a, c, g, or t
  misc_feature (535)..(535): n is a, c, g, or t
  misc_feature (543)..(543): n is a, c, g, or t
  misc_feature (548)..(549): n is a, c, g, or t
  misc_feature (563)..(563): n is a, c, g, or t
  misc_feature (570)..(570): n is a, c, g, or t
  misc_feature (573)..(573): n is a, c, g, or t
  misc_feature (584)..(586): n is a, c, g, or t
  misc_feature (590)..(590): n is a, c, g, or t
  misc_feature (602)..(602): n is a, c, g, or t
  misc_feature (619)..(620): n is a, c, g, or t
  misc_feature (631)..(631): n is a, c, g, or t
  misc_feature (633)..(633): n is a, c, g, or t
  misc_feature (650)..(650): n is a, c, g, or t
  misc_feature (669)..(669): n is a, c, g, or t
  misc_feature (672)..(673): n is a, c, g, or t
  misc_feature (678)..(678): n is a, c, g, or t
  misc_feature (688)..(689): n is a, c, g, or t
  misc_feature (696)..(696): n is a, c, g, or t
  misc_feature (703)..(703): n is a, c, g, or t
  misc_feature (706)..(707): n is a, c, g, or t
  misc_feature (709)..(709): n is a, c, g, or t
  misc_feature (711)..(712): n is a, c, g, or t
  misc_feature (730)..(730): n is a, c, g, or t
  misc_feature (734)..(734): n is a, c, g, or t
  misc_feature (741)..(741): n is a, c, g, or t
  misc_feature (746)..(746): n is a, c, g, or t
  misc_feature (763)..(763): n is a, c, g, or t
  misc_feature (775)..(775): n is a, c, g, or t
  misc_feature (781)..(781): n is a, c, g, or t
  misc_feature (789)..(789): n is a, c, g, or t
  misc_feature (792)..(792): n is a, c, g, or t
  misc_feature (799)..(801): n is a, c, g, or t
  misc_feature (805)..(805): n is a, c, g, or t
  misc_feature (817)..(817): n is a, c, g, or t
  misc_feature (820)..(820): n is a, c, g, or t
  misc_feature (828)..(828): n is a, c, g, or t
  misc_feature (834)..(834): n is a, c, g, or t
  misc_feature (840)..(840): n is a, c, g, or t
  misc_feature (854)..(854): n is a, c, g, or t
  misc_feature (856)..(858): n is a, c, g, or t
  misc_feature (860)..(860): n is a, c, g, or t
  misc_feature (862)..(863): n is a, c, g, or t
  misc_feature (866)..(868): n is a, c, g, or t
  misc_feature (871)..(873): n is a, c, g, or t
  misc_feature (879)..(879): n is a, c, g, or t
  misc_feature (886)..(886): n is a, c, g, or t
  misc_feature (889)..(889): n is a, c, g, or t
  misc_feature (891)..(891): n is a, c, g, or t
  misc_feature (893)..(893): n is a, c, g, or t
  misc_feature (904)..(905): n is a, c, g, or t
  misc_feature (910)..(910): n is a, c, g, or t
  misc_feature (916)..(916): n is a, c, g, or t
  misc_feature (919)..(919): n is a, c, g, or t
  misc_feature (934)..(934): n is a, c, g, or t
  misc_feature (938)..(938): n is a, c, g, or t
  misc_feature (942)..(943): n is a, c, g, or t
  misc_feature (946)..(946): n is a, c, g, or t
  misc_feature (950)..(951): n is a, c, g, or t
  misc_feature (954)..(954): n is a, c, g, or t
  misc_feature (968)..(968): n is a, c, g, or t
  misc_feature (977)..(977): n is a, c, g, or t
  misc_feature (979)..(979): n is a, c, g, or t
  misc_feature (981)..(981): n is a, c, g, or t
  misc_feature (987)..(987): n is a, c, g, or t
  misc_feature (991)..(992): n is a, c, g, or t
  misc_feature (999)..(999): n is a, c, g, or t
  misc_feature (1001)..(1001): n is a, c, g, or t
  misc_feature (1003)..(1003): n is a, c, g, or t
  misc_feature (1005)..(1006): n is a, c, g, or t
  misc_feature (1010)..(1010): n is a, c, g, or t
  misc_feature (1019)..(1019): n is a, c, g, or t
  misc_feature (1023)..(1024): n is a, c, g, or t
  misc_feature (1027)..(1028): n is a, c, g, or t
  misc_feature (1036)..(1036): n is a, c, g, or t
  misc_feature (1040)..(1040): n is a, c, g, or t
  misc_feature (1047)..(1047): n is a, c, g, or t
  misc_feature (1050)..(1051): n is a, c, g, or t
  misc_feature (1055)..(1056): n is a, c, g, or t
  misc_feature (1060)..(1060): n is a, c, g, or t
  misc_feature (1070)..(1071): n is a, c, g, or t
  misc_feature (1074)..(1074): n is a, c, g, or t
  misc_feature (1076)..(1076): n is a, c, g, or t
  misc_feature (1090)..(1091): n is a, c, g, or t
  misc_feature (1094)..(1094): n is a, c, g, or t
  misc_feature (1107)..(1107): n is a, c, g, or t
  misc_feature (1114)..(1114): n is a, c, g, or t
  misc_feature (1116)..(1116): n is a, c, g, or t
  misc_feature (1123)..(1124): n is a, c, g, or t
  misc_feature (1129)..(1129): n is a, c, g, or t
  misc_feature (1133)..(1133): n is a, c, g, or t
  misc_feature (1138)..(1138): n is a, c, g, or t
  misc_feature (1144)..(1144): n is a, c, g, or t
  misc_feature (1154)..(1154): n is a, c, g, or t
  misc_feature (1157)..(1157): n is a, c, g, or t
  misc_feature (1161)..(1161): n is a, c, g, or t
  misc_feature (1174)..(1174): n is a, c, g, or t
  misc_feature (1183)..(1183): n is a, c, g, or t
  misc_feature (1185)..(1185): n is a, c, g, or t
  misc_feature (1188)..(1188): n is a, c, g, or t
  misc_feature (1194)..(1194): n is a, c, g, or t
aaaanagaattaactatgagaggatcgcatcnccctcaccatcacgggatcctatttatagtgacactatanaatcgtcgacccacgcgntccgcccacgcgatccgcccacgcgtccggggccgggcccgagcggatcgcgggctcgggctgcggggctccggctgcgggcgctgggccgcgaggcgcgnagcttgggagcggagcccaggccgtgccgcgcggcgccatgaagggcaaggagganaaggagggcggcgcacggctgggcgctggcggcgnaagccccganaanagcccnagcgcgcaggagctcaaggagcagggcaatcgtctgttcgtgggccgaaagtacccggaggcggcggcctgctactgccgcncgatcgtgagtgcgcccgcgcggggagggcggcggcggtggcaccggggagggncgggnccgggcccggcnggccccaccganggtctggctcctcttcggggcgtgtcctcggctcccaaagnccanccntgtttctcgagcccagctccnggtgccgnagaannagggtgctatgctngatggangcnagccgggtggnnngagngcaggggccctngacccttgaggaccccnngttctaagccngnactctctaaagatttgnaaaatttttcaaaaaacanttnnaatcnattggatagnnttctccnagtactncanntntnnatagatcctttgaacccnaggnctttganaactnataaaacctaattttcntgatttctaacnaatatnacaaaaanctnaggaacnnnccgncgtttttaaaantgngaaacaantaaacnataatncccttatgtatctnannncngnntannnttnnnaaaatntaaaaanccncntntttgttctttnnttaanccaaanaanttctttgttgttttncttnaaannttnatannaanaaatattttatttngttataaantncngaaatncccnntgtaatnangnannaaanaattttgcnaaanntannattcttcntgtntttattnccnntttnnaatngaataacttnnttncntgttatctacaaannatnaacaaaacttatnaattttntnaaattgnnaacgnctanaattntctganaaaatctccnctntaanctctcctaacttnaaaatatananctntaaaancattta

SEQ ID NO: 453 - DNA, 1200 bp, Homo Sapiens; identical to SEQ ID NO: 377
  misc_feature (766)..(766): n is a, c, g, or t
  misc_feature (788)..(788): n is a, c, g, or t
  misc_feature (814)..(814): n is a, c, g, or t
  misc_feature (824)..(824): n is a, c, g, or t
  misc_feature (831)..(831): n is a, c, g, or t
  misc_feature (838)..(838): n is a, c, g, or t
  misc_feature (849)..(849): n is a, c, g, or t
  misc_feature (869)..(869): n is a, c, g, or t
  misc_feature (888)..(888): n is a, c, g, or t
  misc_feature (890)..(890): n is a, c, g, or t
  misc_feature (924)..(924): n is a, c, g, or t
  misc_feature (929)..(929): n is a, c, g, or t
  misc_feature (963)..(963): n is a, c, g, or t
  misc_feature (968)..(968): n is a, c, g, or t
  misc_feature (976)..(976): n is a, c, g, or t
  misc_feature (978)..(978): n is a, c, g, or t
  misc_feature (1001)..(1001): n is a, c, g, or t
  misc_feature (1008)..(1008): n is a, c, g, or t
  misc_feature (1014)..(1015): n is a, c, g, or t
  misc_feature (1028)..(1028): n is a, c, g, or t
  misc_feature (1039)..(1039): n is a, c, g, or t
  misc_feature (1045)..(1045): n is a, c, g, or t
  misc_feature (1049)..(1050): n is a, c, g, or t
  misc_feature (1057)..(1058): n is a, c, g, or t
  misc_feature (1060)..(1060): n is a, c, g, or t
  misc_feature (1084)..(1084): n is a, c, g, or t
  misc_feature (1094)..(1095): n is a, c, g, or t
  misc_feature (1100)..(1100): n is a, c, g, or t
  misc_feature (1109)..(1109): n is a, c, g, or t
  misc_feature (1111)..(1112): n is a, c, g, or t
  misc_feature (1114)..(1114): n is a, c, g, or t
  misc_feature (1116)..(1116): n is a, c, g, or t
  misc_feature (1126)..(1126): n is a, c, g, or t
  misc_feature (1156)..(1156): n is a, c, g, or t
  misc_feature (1171)..(1172): n is a, c, g, or t
  misc_feature (1175)..(1176): n is a, c, g, or t
  misc_feature (1185)..(1187): n is a, c, g, or t
  misc_feature (1192)..(1193): n is a, c, g, or t
  misc_feature (1198)..(1198): n is a, c, g, or t

SEQ ID NO: 454 - DNA, 1200 bp, Homo Sapiens; identical to SEQ ID NO: 119
  misc_feature (1)..(1): n is a, c, g, or t
  misc_feature (6)..(7): n is a, c, g, or t
  misc_feature (731)..(731): n is a, c, g, or t
  misc_feature (781)..(781): n is a, c, g, or t
  misc_feature (798)..(798): n is a, c, g, or t
  misc_feature (835)..(835): n is a, c, g, or t
  misc_feature (856)..(856): n is a, c, g, or t
  misc_feature (866)..(867): n is a, c, g, or t
  misc_feature (885)..(885): n is a, c, g, or t
  misc_feature (903)..(903): n is a, c, g, or t
  misc_feature (922)..(922): n is a, c, g, or t
  misc_feature (933)..(933): n is a, c, g, or t
  misc_feature (941)..(941): n is a, c, g, or t
  misc_feature (954)..(954): n is a, c, g, or t
  misc_feature (969)..(969): n is a, c, g, or t
  misc_feature (972)..(973): n is a, c, g, or t
  misc_feature (978)..(978): n is a, c, g, or t
  misc_feature (980)..(980): n is a, c, g, or t
  misc_feature (987)..(987): n is a, c, g, or t
  misc_feature (989)..(989): n is a, c, g, or t
  misc_feature (995)..(995): n is a, c, g, or t
  misc_feature (998)..(998): n is a, c, g, or t
  misc_feature (1001)..(1001): n is a, c, g, or t
  misc_feature (1009)..(1009): n is a, c, g, or t
  misc_feature (1033)..(1033): n is a, c, g, or t
  misc_feature (1035)..(1035): n is a, c, g, or t
  misc_feature (1048)..(1049): n is a, c, g, or t
  misc_feature (1053)..(1053): n is a, c, g, or t
  misc_feature (1062)..(1062): n is a, c, g, or t
  misc_feature (1066)..(1066): n is a, c, g, or t
  misc_feature (1068)..(1070): n is a, c, g, or t
  misc_feature (1073)..(1074): n is a, c, g, or t
  misc_feature (1076)..(1076): n is a, c, g, or t
  misc_feature (1079)..(1079): n is a, c, g, or t
  misc_feature (1081)..(1082): n is a, c, g, or t
  misc_feature (1088)..(1088): n is a, c, g, or t
  misc_feature (1091)..(1091): n is a, c, g, or t
  misc_feature (1095)..(1096): n is a, c, g, or t
  misc_feature (1098)..(1098): n is a, c, g, or t
  misc_feature (1100)..(1102): n is a, c, g, or t
  misc_feature (1104)..(1105): n is a, c, g, or t
  misc_feature (1107)..(1110): n is a, c, g, or t
  misc_feature (1112)..(1112): n is a, c, g, or t
  misc_feature (1129)..(1129): n is a, c, g, or t
  misc_feature (1133)..(1133): n is a, c, g, or t
  misc_feature (1138)..(1139): n is a, c, g, or t
  misc_feature (1144)..(1146): n is a, c, g, or t
  misc_feature (1148)..(1148): n is a, c, g, or t
  misc_feature (1151)..(1151): n is a, c, g, or t
  misc_feature (1157)..(1157): n is a, c, g, or t
  misc_feature (1165)..(1165): n is a, c, g, or t
  misc_feature (1168)..(1168): n is a, c, g, or t
  misc_feature (1173)..(1173): n is a, c, g, or t
  misc_feature (1181)..(1181): n is a, c, g, or t
  misc_feature (1185)..(1186): n is a, c, g, or t
  misc_feature (1190)..(1190): n is a, c, g, or t

SEQ ID NO: 455 - DNA, 1200 bp, Homo Sapiens
  misc_feature (1)..(1): n is a, c, g, or t
  misc_feature (4)..(4): n is a, c, g, or t
  misc_feature (822)..(822): n is a, c, g, or t
  misc_feature (881)..(881): n is a, c, g, or t
  misc_feature (889)..(889): n is a, c, g, or t
  misc_feature (966)..(966): n is a, c, g, or t
  misc_feature (988)..(988): n is a, c, g, or t
  misc_feature (1018)..(1018): n is a, c, g, or t
  misc_feature (1026)..(1026): n is a, c, g, or t
  misc_feature (1036)..(1037): n is a, c, g, or t
  misc_feature (1041)..(1085): n is a, c, g, or t
  misc_feature (1088)..(1088): n is a, c, g, or t
  misc_feature (1102)..(1102): n is a, c, g, or t
  misc_feature (1105)..(1105): n is a, c, g, or t
  misc_feature (1109)..(1109): n is a, c, g, or t
  misc_feature (1123)..(1127): n is a, c, g, or t
  misc_feature (1130)..(1130): n is a, c, g, or t
  misc_feature (1132)..(1132): n is a, c, g, or t
  misc_feature (1134)..(1134): n is a, c, g, or t
  misc_feature (1136)..(1137): n is a, c, g, or t
  misc_feature (1140)..(1140): n is a, c, g, or t
  misc_feature (1144)..(1144): n is a, c, g, or t
  misc_feature (1153)..(1154): n is a, c, g, or t
  misc_feature (1157)..(1157): n is a, c, g, or t
  misc_feature (1159)..(1159): n is a, c, g, or t
  misc_feature (1163)..(1163): n is a, c, g, or t
  misc_feature (1171)..(1171): n is a, c, g, or t
  misc_feature (1173)..(1173): n is a, c, g, or t
  misc_feature (1183)..(1183): n is a, c, g, or t
  misc_feature (1190)..(1191): n is a, c, g, or t
  misc_feature (1193)..(1193): n is a, c, g, or t
  misc_feature (1195)..(1195): n is a, c, g, or t
ntantagagaaattactatgagaggatcgcatcaccatcaccatcacggatcctatttaggtgacactatagaatcgtcgacccacgcgtccggggaagagtggtgtgggcaagacggcgctggtggccaagctggctggcctggaggtgcctgtggtgcaccacgagaccaccggcatccagaccaccgtggtattttggccagccaagctgcaggccagcagccgtgtcgtcatgtttcgttttgagttctgggactgtggagagtctgcactcaaaaagttcgatcatatgctgctggcttgcatggagaacacagatgccttcctcttcctcttctccttcactgaccgtgcctcctttgaagacctccctggacagctggcccgcatagcaggtgaggcccctggtgtcgtcaggatggtcatcggctccaaatttgaccagtacatgcacacggacgtgcccgagcgggacctcacagccttccggcaggcctgggagctgcccctgctacgggtgaagagtgtgccggggcggcggctggctgatgggcgcacactggacgggcgggctgggctggccgacgttgcccacatactcaatggccttgctgagcagctgtggcaccaggaccaggtggcggctggcctgcttcccaaccccccagagagtgctcctgaatgagtcacgagtggttgcctgtgatcccacccccaaccctcaggtctcgacatagggctggaggctggggcaggaacatggatcctatctggaggactggccagcatggcctgatcagggaggatgtggccagaaaangcccacccgcgagcagcgctttccttgcaaaattcatggcagggaggtggggaaccaangccctganctcgaacatctcccgtggcctttccccctttggcagcaccgatgaagatgactgggaaaaggggtgcctctcaagtnacttcaatcaaaaacctgtatnggttgaggtgaaaccatctgttgtaaaaanaaaccccnaattcccaannaaannnnnnnnnnnnnnnnnnnnnnnnnnnnnnnnnnnnnnnnnnnnnggnggccccccccaaanggngccnaataaacttaattnnnnnaantngnannccngttnaaaaatccnnaangncccnaaaccccncnggattttttnaaaaccnngntnccccc

SEQ ID NO: 456 - DNA, 1200 bp, Homo Sapiens
  misc_feature (1)..(1): n is a, c, g, or t
  misc_feature (4)..(4): n is a, c, g, or t
  misc_feature (10)..(10): n is a, c, g, or t
  misc_feature (13)..(14): n is a, c, g, or t
  misc_feature (709)..(709): n is a, c, g, or t
  misc_feature (760)..(760): n is a, c, g, or t
  misc_feature (857)..(857): n is a, c, g, or t
  misc_feature (885)..(885): n is a, c, g, or t
  misc_feature (887)..(887): n is a, c, g, or t
  misc_feature (901)..(901): n is a, c, g, or t
  misc_feature (910)..(910): n is a, c, g, or t
  misc_feature (912)..(912): n is a, c, g, or t
  misc_feature (919)..(919): n is a, c, g, or t
  misc_feature (929)..(929): n is a, c, g, or t
  misc_feature (939)..(939): n is a, c, g, or t
  misc_feature (943)..(943): n is a, c, g, or t
  misc_feature (959)..(959): n is a, c, g, or t
  misc_feature (970)..(970): n is a, c, g, or t
  misc_feature (993)..(993): n is a, c, g, or t
  misc_feature (995)..(995): n is a, c, g, or t
  misc_feature (1000)..(1000): n is a, c, g, or t
  misc_feature (1003)..(1003): n is a, c, g, or t
  misc_feature (1006)..(1006): n is a, c, g, or t
  misc_feature (1013)..(1013): n is a, c, g, or t
  misc_feature (1022)..(1022): n is a, c, g, or t
  misc_feature (1030)..(1030): n is a, c, g, or t
  misc_feature (1036)..(1039): n is a, c, g, or t
  misc_feature (1047)..(1047): n is a, c, g, or t
  misc_feature (1061)..(1062): n is a, c, g, or t
  misc_feature (1065)..(1065): n is a, c, g, or t
  misc_feature (1071)..(1071): n is a, c, g, or t
  misc_feature (1073)..(1073): n is a, c, g, or t
  misc_feature (1078)..(1078): n is a, c, g, or t
  misc_feature (1081)..(1081): n is a, c, g, or t
  misc_feature (1088)..(1089): n is a, c, g, or t
  misc_feature (1091)..(1091): n is a, c, g, or t
  misc_feature (1102)..(1102): n is a, c, g, or t
  misc_feature (1107)..(1107): n is a, c, g, or t
  misc_feature (1110)..(1110): n is a, c, g, or t
  misc_feature (1113)..(1113): n is a, c, g, or t
  misc_feature (1119)..(1119): n is a, c, g, or t
  misc_feature (1125)..(1125): n is a, c, g, or t
  misc_feature (1131)..(1131): n is a, c, g, or t
  misc_feature (1135)..(1135): n is a, c, g, or t
  misc_feature (1139)..(1140): n is a, c, g, or t
  misc_feature (1143)..(1143): n is a, c, g, or t
  misc_feature (1145)..(1147): n is a, c, g, or t
  misc_feature (1150)..(1151): n is a, c, g, or t
  misc_feature (1162)..(1162): n is a, c, g, or t
  misc_feature (1164)..(1164): n is a, c, g, or t
  misc_feature (1172)..(1172): n is a, c, g, or t
  misc_feature (1174)..(1174): n is a, c, g, or t
  misc_feature (1179)..(1179): n is a, c, g, or t
  misc_feature (1181)..(1181): n is a, c, g, or t
  misc_feature (1183)..(1184): n is a, c, g, or t
  misc_feature (1187)..(1188): n is a, c, g, or t
  misc_feature (1191)..(1191): n is a, c, g, or t
  misc_feature (1193)..(1194): n is a, c, g, or t
  misc_feature (1196)..(1196): n is a, c, g, or t
  misc_feature (1198)..(1199): n is a, c, g, or t
ngantagagngannactatgagaggatcgcatcaccatcaccatcacggatcctatttaggtgacactatagaatcgtcgacccacgcgtccgggccttgccccgctctgcagcacagacaggccagatgcatttgtcctttgcctagctactccccaggtagagagtgctcctggtggcctggcaggtctgggcccttctctccctgcccaggttgtccctggagggcagccctcactccctttgggggagaggcagacattgctgcccacagacctgcctctgactcaactgtgtccaccctccctggtccctacccccaagtcacaggtgactcagcagtgaccctgtgtgccaggccagatccaaactgagagggaaggtgtcgtttttacactgctaatgacgagagtggctctttttagctaggcgagtacagacggggcctgggagggggcagagatgttccccaggccctgcctgtggttcctgcctgggccttggctgctgctgtgtgagagctgcatgtgagcctgtgaccgtgagctggggtgagctgggccgcacctaccctggggccccagggagcaggacgctccggggcccagcacgttgccctgggcctgtggccggagtcggagtcctctctcctcctcctggcttttggaaaggcttggctgtgttggggagtctctcttagccctttcangaatttctgttcaggcttcctcctcctcatcagctattttacccatctcanaacgtcctgtgtctccatgtaggagagtggctctctcaaatctctcagggcgtctggttatagggaaacaagtggagcagggacgtggctttaattnggaacactcggctgggctgcttgggganantcttccgtgcgttnttcctctgnanaaaaacnaccacctccntgggcgtcantganaaactccatctaaacntccaaagccanaaaactaggggctcaaaaccaananctggnaanccnccaaccnaaaatgaangccatttnctgaannnnaaaccaancccttttggggggnnacntttttncncaccnaanccccttnntntttcctttttnaaagnccnggngttttnttttcntacccngggnttgnncangnnnaannccggtttttcnanccaaatcntnaaaancnannccnnggnannangnnc

SEQ ID NO: 457 - DNA, 1200 bp, Homo Sapiens
  misc_feature (949)..(949): n is a, c, g, or t
  misc_feature (953)..(953): n is a, c, g, or t
  misc_feature (968)..(969): n is a, c, g, or t
  misc_feature (974)..(974): n is a, c, g, or t
  misc_feature (988)..(988): n is a, c, g, or t
  misc_feature (1010)..(1010): n is a, c, g, or t
  misc_feature (1043)..(1043): n is a, c, g, or t
  misc_feature (1071)..(1071): n is a, c, g, or t
  misc_feature (1075)..(1075): n is a, c, g, or t
  misc_feature (1079)..(1079): n is a, c, g, or t
  misc_feature (1081)..(1081): n is a, c, g, or t
  misc_feature (1120)..(1121): n is a, c, g, or t
  misc_feature (1123)..(1123): n is a, c, g, or t
  misc_feature (1140)..(1140): n is a, c, g, or t
  misc_feature (1143)..(1143): n is a, c, g, or t
  misc_feature (1157)..(1157): n is a, c, g, or t
  misc_feature (1161)..(1161): n is a, c, g, or t
  misc_feature (1163)..(1163): n is a, c, g, or t
  misc_feature (1171)..(1171): n is a, c, g, or t
  misc_feature (1181)..(1182): n is a, c, g, or t
  misc_feature (1191)..(1191): n is a, c, g, or t
  misc_feature (1196)..(1196): n is a, c, g, or t
tagagaaattactatgagaggatcgcatcaccatcaccatcacggatcctatttaggtgacactatagaatcgtcgacccacgcgtccggcggaggcagcgggggaagatggcggcggccgttccacagcgggcgtggaccgtggagcagctgcgcatttcttgcagaacataaattattaggaaacattaaaaatgtggccaagacagctaacaaggaccacttggttacagcctataaccatctttttgaaactaagcgttttaagggtactgaaagtataagtaaagtgtctgagcaagtaaaaaatgtgaagcttaatgaagataaacccaaagaaaccaagtctgaagagaccctggatgagggtccaccaaaatatactaaatctgttctgaaaaagggagataaaaccaactttcccaaaaagggagatgttgttcactgctggtatacaggaacactacaagatgggactgtttttgatactaatattcaaacaagtgcaaagaagaagaaaaatgccaagcctttaagttttaaggtcggagtaggcaaagttatcagaggatgggatgaagctctcttgactatgagtaaaggagaaaaggctcgactggagattgaaccagaatgggcttacggaaagaaaggacagcctgatgccaaaattccaccaaatgcaaaactcacttttgaagtggaattagtggatattgattgaaatagcagtgcttcagctctaaggatattagcaacaatgataaaacttggccttgaagaaatttacacaactagttagaacttgttactattgtaaaggaagagtcaactggaaaattcaaggagttaataaaatttgtttacttggtcccagcttttgagagataaatcccttatgaatccctggtctaaatactttcctacagctgtgtaaaatactggtcangganaactttttccttttnncctcntgttgtaaacttangtggctcaataaaattgatccnctgtcttgatctgactgggatttgtttggggtnaaaatattatggttctgattagggaatngganctangnccccctccaacccgggagtacctcccgtaaattttctgnnanatgcctgttaatgaaangcnaaacctaaggttgngggnancaaagctnaaaccaaaannttggcgganatcanactg

SEQ ID NO: 458 - DNA, 1200 bp, Homo Sapiens
  misc_feature (843)..(843): n is a, c, g, or t
  misc_feature (877)..(877): n is a, c, g, or t
  misc_feature (882)..(882): n is a, c, g, or t
  misc_feature (953)..(953): n is a, c, g, or t
  misc_feature (975)..(975): n is a, c, g, or t
  misc_feature (977)..(977): n is a, c, g, or t
  misc_feature (989)..(989): n is a, c, g, or t
  misc_feature (1009)..(1009): n is a, c, g, or t
  misc_feature (1022)..(1022): n is a, c, g, or t
  misc_feature (1028)..(1028): n is a, c, g, or t
  misc_feature (1030)..(1030): n is a, c, g, or t
  misc_feature (1043)..(1043): n is a, c, g, or t
  misc_feature (1045)..(1045): n is a, c, g, or t
  misc_feature (1072)..(1073): n is a, c, g, or t
  misc_feature (1075)..(1075): n is a, c, g, or t
  misc_feature (1087)..(1087): n is a, c, g, or t
  misc_feature (1110)..(1110): n is a, c, g, or t
  misc_feature (1129)..(1129): n is a, c, g, or t
  misc_feature (1133)..(1133): n is a, c, g, or t
  misc_feature (1140)..(1140): n is a, c, g, or t
  misc_feature (1145)..(1145): n is a, c, g, or t
  misc_feature (1156)..(1156): n is a, c, g, or t
  misc_feature (1161)..(1162): n is a, c, g, or t
  misc_feature (1186)..(1186): n is a, c, g, or t
  misc_feature (1188)..(1188): n is a, c, g, or t
  misc_feature (1200)..(1200): n is a, c, g, or t
agaaattactatgagaggatcgcatcaccatcaccatcacggatcctatttaggtgacactatagaatcgtcgacccacgcgtccggagaagaagaatgtgggcaaggtcctcctggttccagggccagagaaggagaactagggcaagtggctgtgagaccctagagaccagcgaagggagaagttgggaagctacgttctgttggccaccagacttgcatttcagcctctgtcataatgctctgccctccctcccccgaagttctctgtggtgatgaccgctctcccctgcccctccccgcttcctgacctctgaagaggttgggaagtgaccatttggatgtctgggccctgccaaggcgacagggagggtcagagggaggccggctgcttcctgcccccaccctttccccgggcctgctgtgctgcttttgtgccaaggttagccagtcccccctgttgtgttccatgtgctttcacctctgcctcatctttcctcccgtccctgccccgccacctccccaaagaattgaaacgtcagctcaggatatggggccaatctctgtgagtccagcatgtacctgtctctccctagtgtcccttcagcctgggctgaccagtgcccgcctctgggcttgaccagttcccaatctcgtcctctgtccccaacttcttaagcacaattgggcttcttccatctccaggttttctgccattcttaaccaaggctgcctcttccaacagggcgggaatcagacctactcccctaggtcacaactctgggaaggatacagagcccccacccttcactgagttctctggatttgttctcagtgccttancaacgaaaaacctgtgcttgtgtgtgtgtggcgncgggnaaggaagaatcctgtttcccacctccttctcctcccctgtactccccagtgccttccttgttctggggganctggggtttctctcctccccantncccacaaactgncaaaaatctgtgtatgtgcnattgggtggggcnaccccnancctcctggggagnanggcaaaaaaggggcccccatcggggtnngngccatgtcccgnctctatgggggttgaagaaaaangggggaaacttccccaccnttgnaaaaatnggggnatttataaccnaaaannttaaaggaatgttttttttttttntntgggaacaaaan

SEQ ID NO: 459 - DNA, 852 bp, Homo Sapiens; identical to SEQ ID NO: 147
  misc_feature (788)..(789): n is a, c, g, or t
  misc_feature (791)..(791): n is a, c, g, or t
  misc_feature (795)..(798): n is a, c, g, or t
  misc_feature (800)..(852): n is a, c, g, or t

SEQ ID NO: 460 - DNA, 1200 bp, Homo Sapiens; identical to SEQ ID NO: 43
  misc_feature (920)..(920): n is a, c, g, or t
  misc_feature (922)..(922): n is a, c, g, or t
  misc_feature (940)..(940): n is a, c, g, or t
  misc_feature (960)..(960): n is a, c, g, or t
  misc_feature (970)..(970): n is a, c, g, or t
  misc_feature (972)..(972): n is a, c, g, or t
  misc_feature (976)..(976): n is a, c, g, or t
  misc_feature (982)..(982): n is a, c, g, or t
  misc_feature (986)..(986): n is a, c, g, or t
  misc_feature (993)..(993): n is a, c, g, or t
  misc_feature (999)..(999): n is a, c, g, or t
  misc_feature (1001)..(1001): n is a, c, g, or t
  misc_feature (1005)..(1005): n is a, c, g, or t
  misc_feature (1007)..(1007): n is a, c, g, or t
  misc_feature (1011)..(1011): n is a, c, g, or t
  misc_feature (1020)..(1020): n is a, c, g, or t
  misc_feature (1061)..(1061): n is a, c, g, or t
  misc_feature (1087)..(1087): n is a, c, g, or t
  misc_feature (1108)..(1108): n is a, c, g, or t
  misc_feature (1114)..(1114): n is a, c, g, or t
  misc_feature (1119)..(1119): n is a, c, g, or t
  misc_feature (1124)..(1124): n is a, c, g, or t
  misc_feature (1132)..(1132): n is a, c, g, or t
  misc_feature (1135)..(1135): n is a, c, g, or t
  misc_feature (1141)..(1141): n is a, c, g, or t
  misc_feature (1145)..(1145): n is a, c, g, or t
  misc_feature (1148)..(1148): n is a, c, g, or t
  misc_feature (1157)..(1157): n is a, c, g, or t
  misc_feature (1160)..(1160): n is a, c, g, or t
  misc_feature (1162)..(1162): n is a, c, g, or t
  misc_feature (1165)..(1165): n is a, c, g, or t
  misc_feature (1168)..(1168): n is a, c, g, or t
  misc_feature (1186)..(1186): n is a, c, g, or t
  misc_feature (1189)..(1189): n is a, c, g, or t
  misc_feature (1192)..(1192): n is a, c, g, or t
  misc_feature (1194)..(1197): n is a, c, g, or t

SEQ ID NO: 461 - DNA, 1200 bp, Homo Sapiens
  misc_feature (820)..(820): n is a, c, g, or t
  misc_feature (910)..(910): n is a, c, g, or t
  misc_feature (922)..(922): n is a, c, g, or t
  misc_feature (931)..(931): n is a, c, g, or t
  misc_feature (937)..(938): n is a, c, g, or t
  misc_feature (972)..(972): n is a, c, g, or t
  misc_feature (983)..(983): n is a, c, g, or t
  misc_feature (992)..(992): n is a, c, g, or t
  misc_feature (1002)..(1002): n is a, c, g, or t
  misc_feature (1007)..(1007): n is a, c, g, or t
  misc_feature (1018)..(1018): n is a, c, g, or t
  misc_feature (1024)..(1024): n is a, c, g, or t
  misc_feature (1037)..(1038): n is a, c, g, or t
  misc_feature (1041)..(1041): n is a, c, g, or t
  misc_feature (1044)..(1044): n is a, c, g, or t
  misc_feature (1046)..(1046): n is a, c, g, or t
  misc_feature (1056)..(1056): n is a, c, g, or t
  misc_feature (1063)..(1064): n is a, c, g, or t
  misc_feature (1069)..(1069): n is a, c, g, or t
  misc_feature (1071)..(1071): n is a, c, g, or t
  misc_feature (1080)..(1080): n is a, c, g, or t
  misc_feature (1083)..(1083): n is a, c, g, or t
  misc_feature (1089)..(1089): n is a, c, g, or t
  misc_feature (1091)..(1091): n is a, c, g, or t
  misc_feature (1094)..(1097): n is a, c, g, or t
  misc_feature (1100)..(1100): n is a, c, g, or t
  misc_feature (1103)..(1103): n is a, c, g, or t
  misc_feature (1108)..(1110): n is a, c, g, or t
  misc_feature (1117)..(1117): n is a, c, g, or t
  misc_feature (1126)..(1126): n is a, c, g, or t
  misc_feature (1141)..(1141): n is a, c, g, or t
  misc_feature (1147)..(1148): n is a, c, g, or t
  misc_feature (1150)..(1151): n is a, c, g, or t
  misc_feature (1157)..(1157): n is a, c, g, or t
  misc_feature (1165)..(1165): n is a, c, g, or t
  misc_feature (1167)..(1168): n is a, c, g, or t
  misc_feature (1170)..(1171): n is a, c, g, or t
  misc_feature (1173)..(1173): n is a, c, g, or t
  misc_feature (1176)..(1176): n is a, c, g, or t
  misc_feature (1181)..(1181): n is a, c, g, or t
  misc_feature (1184)..(1184): n is a, c, g, or t
  misc_feature (1189)..(1189): n is a, c, g, or t
  misc_feature (1191)..(1191): n is a, c, g, or t
  misc_feature (1194)..(1194): n is a, c, g, or t
tagagaaattactatgagaggatcgcatcaccatcaccatcacggatcctatttaggtgacactatagaatcgtcgacccacgcgtccgcccacgcgtccgccaaagccctggctatgaacctcggagccccgggtatgaaccccggagccctggctatgaatctgagagctctagatatgaatcccagaacactgagctcaaaacccaaagcccagaatttgaagctcaaagttccaaattccaggaaggtgcggagatgcttctgaaccccgaggaaaagagtcctttgaatatctccgtaggagttcaccccctggactccttcactcaggggtttggggagcagcccacaggggacctgcccatagggccaccttttgagatgcccacaggggccctgctgtctacaccgcagtttgagatgcttcagaatcccctgggtctcacaggagcccttcgaggtccaggtcggcggggtggccgggccaggggtgggcagggccctcggcctaacatctgcggcatctgcgggaagagcttcgggcggggctccaccctgatccagcaccagcgcatccacaccggtgagaagccctacaaatgtgaggtctgcagcaaggccttctcccagagctctgacctcatcaaacaccagcgcacccacactggcgagcggccctacaaatgtccccgttgcggcaaggccttcgccgacagctcttacctgcttcgccaccagcgcactcactctggccagaagccctacaagtgcccacattgtggcaaggccttcggcgacagctcctacctcctgcganaccagcgcacccacagccacgagcggccctacagctgcaccgagtgcggcaagtgctatagccagaaactcgtccctgcgcagccatcanagggtgcacacnggtcaaagncccttnnagctgtggcatctgcggcaaaagctttctcccancggtcggcccnttatccccnatgcccgcanccacncccgggaaaancccttncaagtgccctganntgnggnangcgctttggnccaaaanntgggngntgggcaatncangcccgnanccnnnntgncanggccnnncctaaangttgccccnaatgggggaaaaaantttaanngnntctcantttaatcnannannanggnttccnaanggggnanggncctaag

SEQ ID NO: 462 - DNA, 1200 bp, Homo Sapiens
  misc_feature (422)..(422): n is a, c, g, or t
  misc_feature (444)..(444): n is a, c, g, or t
  misc_feature (543)..(543): n is a, c, g, or t
  misc_feature (569)..(570): n is a, c, g, or t
  misc_feature (581)..(582): n is a, c, g, or t
  misc_feature (586)..(586): n is a, c, g, or t
  misc_feature (596)..(596): n is a, c, g, or t
  misc_feature (599)..(600): n is a, c, g, or t
  misc_feature (602)..(603): n is a, c, g, or t
  misc_feature (610)..(610): n is a, c, g, or t
  misc_feature (613)..(613): n is a, c, g, or t
  misc_feature (616)..(616): n is a, c, g, or t
  misc_feature (627)..(627): n is a, c, g, or t
  misc_feature (631)..(631): n is a, c, g, or t
  misc_feature (634)..(634): n is a, c, g, or t
  misc_feature (636)..(636): n is a, c, g, or t
  misc_feature (641)..(641): n is a, c, g, or t
  misc_feature (646)..(646): n is a, c, g, or t
  misc_feature (650)..(650): n is a, c, g, or t
  misc_feature (653)..(653): n is a, c, g, or t
  misc_feature (655)..(656): n is a, c, g, or t
  misc_feature (660)..(660): n is a, c, g, or t
  misc_feature (662)..(662): n is a, c, g, or t
  misc_feature (667)..(669): n is a, c, g, or t
  misc_feature (674)..(676): n is a, c, g, or t
  misc_feature (683)..(684): n is a, c, g, or t
  misc_feature (686)..(686): n is a, c, g, or t
  misc_feature (700)..(700): n is a, c, g, or t
  misc_feature (702)..(703): n is a, c, g, or t
  misc_feature (709)..(709): n is a, c, g, or t
  misc_feature (713)..(713): n is a, c, g, or t
  misc_feature (715)..(715): n is a, c, g, or t
  misc_feature (717)..(717): n is a, c, g, or t
  misc_feature (724)..(724): n is a, c, g, or t
  misc_feature (726)..(727): n is a, c, g, or t
  misc_feature (734)..(735): n is a, c, g, or t
  misc_feature (737)..(737): n is a, c, g, or t
  misc_feature (742)..(742): n is a, c, g, or t
  misc_feature (747)..(747): n is a, c, g, or t
  misc_feature (750)..(752): n is a, c, g, or t
  misc_feature (756)..(756): n is a, c, g, or t
  misc_feature (759)..(759): n is a, c, g, or t
  misc_feature (761)..(761): n is a, c, g, or t
  misc_feature (763)..(763): n is a, c, g, or t
  misc_feature (766)..(767): n is a, c, g, or t
  misc_feature (780)..(780): n is a, c, g, or t
  misc_feature (783)..(784): n is a, c, g, or t
  misc_feature (786)..(786): n is a, c, g, or t
  misc_feature (788)..(789): n is a, c, g, or t
  misc_feature (791)..(792): n is a, c, g, or t
  misc_feature (796)..(796): n is a, c, g, or t
  misc_feature (799)..(800): n is a, c, g, or t
  misc_feature (803)..(803): n is a, c, g, or t
  misc_feature (805)..(805): n is a, c, g, or t
  misc_feature (807)..(810): n is a, c, g, or t
  misc_feature (813)..(813): n is a, c, g, or t
  misc_feature (815)..(815): n is a, c, g, or t
  misc_feature (817)..(817): n is a, c, g, or t
  misc_feature (822)..(822): n is a, c, g, or t
  misc_feature (824)..(824): n is a, c, g, or t
  misc_feature (832)..(832): n is a, c, g, or t
  misc_feature (834)..(834): n is a, c, g, or t
  misc_feature (836)..(836): n is a, c, g, or t
  misc_feature (842)..(842): n is a, c, g, or t
  misc_feature (844)..(844): n is a, c, g, or t
  misc_feature (849)..(849): n is a, c, g, or t
  misc_feature (851)..(853): n is a, c, g, or t
  misc_feature (855)..(855): n is a, c, g, or t
  misc_feature (862)..(863): n is a, c, g, or t
  misc_feature (869)..(871): n is a, c, g, or t
  misc_feature (878)..(879): n is a, c, g, or t
  misc_feature (881)..(881): n is a, c, g, or t
  misc_feature (883)..(883): n is a, c, g, or t
  misc_feature (887)..(887): n is a, c, g, or t
  misc_feature (890)..(890): n is a, c, g, or t
  misc_feature (894)..(894): n is a, c, g, or t
  misc_feature (900)..(900): n is a, c, g, or t
  misc_feature (904)..(910): n is a, c, g, or t
  misc_feature (912)..(912): n is a, c, g, or t
  misc_feature (914)..(914): n is a, c, g, or t
  misc_feature (919)..(919): n is a, c, g, or t
  misc_feature (923)..(924): n is a, c, g, or t
  misc_feature (927)..(929): n is a, c, g, or t
  misc_feature (938)..(939): n is a, c, g, or t
  misc_feature (941)..(944): n is a, c, g, or t
  misc_feature (946)..(948): n is a, c, g, or t
  misc_feature (950)..(950): n is a, c, g, or t
  misc_feature (954)..(954): n is a, c, g, or t
  misc_feature (958)..(959): n is a, c, g, or t
  misc_feature (961)..(961): n is a, c, g, or t
  misc_feature (966)..(969): n is a, c, g, or t
  misc_feature (979)..(981): n is a, c, g, or t
  misc_feature (984)..(984): n is a, c, g, or t
  misc_feature (987)..(987): n is a, c, g, or t
  misc_feature (989)..(989): n is a, c, g, or t
  misc_feature (991)..(992): n is a, c, g, or t
  misc_feature (995)..(995): n is a, c, g, or t
  misc_feature (998)..(998): n is a, c, g, or t
  misc_feature (1000)..(1003): n is a, c, g, or t
  misc_feature (1009)..(1009): n is a, c, g, or t
  misc_feature (1013)..(1013): n is a, c, g, or t
  misc_feature (1016)..(1016): n is a, c, g, or t
  misc_feature (1024)..(1026): n is a, c, g, or t
  misc_feature (1028)..(1028): n is a, c, g, or t
  misc_feature (1032)..(1032): n is a, c, g, or t
  misc_feature (1037)..(1037): n is a, c, g, or t
  misc_feature (1040)..(1040): n is a, c, g, or t
  misc_feature (1047)..(1047): n is a, c, g, or t
  misc_feature (1053)..(1053): n is a, c, g, or t
  misc_feature (1065)..(1065): n is a, c, g, or t
  misc_feature (1068)..(1071): n is a, c, g, or t
  misc_feature (1080)..(1080): n is a, c, g, or t
  misc_feature (1082)..(1082): n is a, c, g, or t
  misc_feature (1085)..(1086): n is a, c, g, or t
  misc_feature (1088)..(1089): n is a, c, g, or t
  misc_feature (1093)..(1093): n is a, c, g, or t
  misc_feature (1095)..(1095): n is a, c, g, or t
  misc_feature (1102)..(1102): n is a, c, g, or t
  misc_feature (1109)..(1109): n is a, c, g, or t
  misc_feature (1111)..(1112): n is a, c, g, or t
  misc_feature (1117)..(1118): n is a, c, g, or t
  misc_feature (1122)..(1122): n is a, c, g, or t
  misc_feature (1124)..(1124): n is a, c, g, or t
  misc_feature (1126)..(1126): n is a, c, g, or t
  misc_feature (1130)..(1130): n is a, c, g, or t
  misc_feature (1132)..(1133): n is a, c, g, or t
  misc_feature (1136)..(1136): n is a, c, g, or t
  misc_feature (1138)..(1138): n is a, c, g, or t
  misc_feature (1140)..(1144): n is a, c, g, or t
  misc_feature (1149)..(1150): n is a, c, g, or t
  misc_feature (1160)..(1160): n is a, c, g, or t
  misc_feature (1172)..(1172): n is a, c, g, or t
  misc_feature (1174)..(1174): n is a, c, g, or t
  misc_feature (1178)..(1180): n is a, c, g, or t
  misc_feature (1186)..(1186): n is a, c, g, or t
  misc_feature (1191)..(1192): n is a, c, g, or t
  misc_feature (1194)..(1195): n is a, c, g, or t
  misc_feature (1197)..(1197): n is a, c, g, or t
  misc_feature (1199)..(1199): n is a, c, g, or t
catatagagaaattactatgagaggatcgcatcaccatcaccatcacggatcctatttaggtgacactatagaatcgtcgacccacgcgtccgcccacgcgtccgccaggattccctcagtaacggcgagtgaacagggaagagcccagcgccgaatccccgccccgcggcggggcgcgggacatgtggcgtacggaagacccgctccccggcgccgctcgtggggggcccaagtccttctgatcgaggcccagcccgtggacggtgtgaggccggtagcggcccccggcgcgccgggcccgggtcttcccggagtcgggttgcttgggaatgcagcccaaagcgggtggtaaactccatctaaggctaaataccggcacgagaccgatagtcaacaagtaccgtaagggaaagttgaaaanaactttgaagagagagttcaanagggcgtgaaaccgttaagaggtaaacgggtggggtccgcgcattccgcccggaggattcaacccggcggctgggtccggccgtgtcggcggcccggcngatctttcccgccccccgttcctccnnatacatccacnngccntccctttccnccnncnncccttcntcntcntctctggaggntgangtntncctgntattngcgnttntnnatgnantttgnnntgaannntaacaanngntaaactgttccttntnnttattncggntntngaacaantnnatttttnntntctgncattnttnnnctgnttntntnccnnactttttttttanagnncnanntnngaantannaantntnnnntgncntnttctntnattttttntnancaacancncattnannnancaatatnnataatnnnttttttnnananaaantcntctntttctnaaannnnnnnantnttttntttnnttnnnatttttttnncnnnntnnntntttnaatnncntaatnnnntatttaattnnnttnatnantnnatnttntnnnnaaatanattnttntaatatannntnaaanatacntantattttntttttnaaataattttcnatnnnnatttcaatntnttnntnntttntnttaatanttttttntnnttttnnaatntntnttanannatncntnnnnnttttnntttaaaaaanaatttttttttntnaatnnntttttnaaaanntnntnant

SEQ ID NO: 463 - DNA, 871 bp, Homo Sapiens; identical to SEQ ID NO: 51
  misc_feature (793)..(793): n is a, c, g, or t
  misc_feature (798)..(802): n is a, c, g, or t
  misc_feature (808)..(860): n is a, c, g, or t
  misc_feature (871)..(871): n is a, c, g, or t

SEQ ID NO: 464 - DNA, 1200 bp, Homo Sapiens; identical to SEQ ID NO: 16
  misc_feature (967)..(967): n is a, c, g, or t
  misc_feature (987)..(987): n is a, c, g, or t
  misc_feature (998)..(998): n is a, c, g, or t
  misc_feature (1016)..(1016): n is a, c, g, or t
  misc_feature (1041)..(1041): n is a, c, g, or t
  misc_feature (1044)..(1044): n is a, c, g, or t
  misc_feature (1050)..(1051): n is a, c, g, or t
  misc_feature (1066)..(1066): n is a, c, g, or t
  misc_feature (1068)..(1068): n is a, c, g, or t
  misc_feature (1071)..(1071): n is a, c, g, or t
  misc_feature (1074)..(1074): n is a, c, g, or t
  misc_feature (1079)..(1079): n is a, c, g, or t
  misc_feature (1081)..(1081): n is a, c, g, or t
  misc_feature (1086)..(1086): n is a, c, g, or t
  misc_feature (1095)..(1095): n is a, c, g, or t
  misc_feature (1097)..(1097): n is a, c, g, or t
  misc_feature (1099)..(1099): n is a, c, g, or t
  misc_feature (1110)..(1110): n is a, c, g, or t
  misc_feature (1118)..(1118): n is a, c, g, or t
  misc_feature (1120)..(1120): n is a, c, g, or t
  misc_feature (1129)..(1129): n is a, c, g, or t
  misc_feature (1133)..(1133): n is a, c, g, or t
  misc_feature (1135)..(1135): n is a, c, g, or t
  misc_feature (1137)..(1137): n is a, c, g, or t
  misc_feature (1139)..(1139): n is a, c, g, or t
  misc_feature (1143)..(1143): n is a, c, g, or t
  misc_feature (1153)..(1153): n is a, c, g, or t
  misc_feature (1164)..(1164): n is a, c, g, or t
  misc_feature (1167)..(1168): n is a, c, g, or t
  misc_feature (1191)..(1191): n is a, c, g, or t
  misc_feature (1194)..(1194): n is a, c, g, or t
  misc_feature (1199)..(1199): n is a, c, g, or t

SEQ ID NO: 465 - DNA, 1200 bp, Homo Sapiens
  misc_feature (574)..(574): n is a, c, g, or t
  misc_feature (663)..(663): n is a, c, g, or t
  misc_feature (807)..(807): n is a, c, g, or t
  misc_feature (839)..(839): n is a, c, g, or t
  misc_feature (853)..(853): n is a, c, g, or t
  misc_feature (866)..(866): n is a, c, g, or t
  misc_feature (874)..(874): n is a, c, g, or t
  misc_feature (893)..(893): n is a, c, g, or t
  misc_feature (909)..(909): n is a, c, g, or t
  misc_feature (918)..(918): n is a, c, g, or t
  misc_feature (925)..(926): n is a, c, g, or t
  misc_feature (937)..(937): n is a, c, g, or t
  misc_feature (944)..(944): n is a, c, g, or t
  misc_feature (946)..(946): n is a, c, g, or t
  misc_feature (969)..(969): n is a, c, g, or t
  misc_feature (971)..(972): n is a, c, g, or t
  misc_feature (976)..(976): n is a, c, g, or t
  misc_feature (979)..(979): n is a, c, g, or t
  misc_feature (982)..(982): n is a, c, g, or t
  misc_feature (984)..(985): n is a, c, g, or t
  misc_feature (1001)..(1001): n is a, c, g, or t
  misc_feature (1006)..(1007): n is a, c, g, or t
  misc_feature (1009)..(1009): n is a, c, g, or t
  misc_feature (1019)..(1020): n is a, c, g, or t
  misc_feature (1022)..(1022): n is a, c, g, or t
  misc_feature (1024)..(1024): n is a, c, g, or t
  misc_feature (1031)..(1031): n is a, c, g, or t
  misc_feature (1035)..(1035): n is a, c, g, or t
  misc_feature (1047)..(1047): n is a, c, g, or t
  misc_feature (1053)..(1054): n is a, c, g, or t
  misc_feature (1056)..(1056): n is a, c, g, or t
  misc_feature (1059)..(1059): n is a, c, g, or t
  misc_feature (1065)..(1065): n is a, c, g, or t
  misc_feature (1072)..(1073): n is a, c, g, or t
  misc_feature (1085)..(1086): n is a, c, g, or t
  misc_feature (1091)..(1091): n is a, c, g, or t
  misc_feature (1096)..(1096): n is a, c, g, or t
  misc_feature (1102)..(1103): n is a, c, g, or t
  misc_feature (1105)..(1105): n is a, c, g, or t
  misc_feature (1109)..(1109): n is a, c, g, or t
  misc_feature (1126)..(1126): n is a, c, g, or t
  misc_feature (1134)..(1134): n is a, c, g, or t
  misc_feature (1144)..(1146): n is a, c, g, or t
  misc_feature (1148)..(1151): n is a, c, g, or t
  misc_feature (1159)..(1159): n is a, c, g, or t
  misc_feature (1163)..(1163): n is a, c, g, or t
  misc_feature (1165)..(1166): n is a, c, g, or t
  misc_feature (1168)..(1169): n is a, c, g, or t
  misc_feature (1174)..(1174): n is a, c, g, or t
  misc_feature (1177)..(1177): n is a, c, g, or t
  misc_feature (1185)..(1186): n is a, c, g, or t
  misc_feature (1198)..(1198): n is a, c, g, or t
aatagagaaattactatgagaggatcgcatcaccatcaccatcacggatcctatttaggtgacactatagaatcgtcgacccacgcgtccgcccacgcgtccggcgacgacacgatgaaggagctgcacctggccatccccgccaagatcacccgggagaagctggaccaagtggcgacagcagtgtaccagatgatggatcagctgtaccaggggaagatgtacttccccgggtatttccccaacgagctgcgaaacatcttccgggagcaggtgcacctcatccagaacgccatcatcgaaagccgcatcgactgtcagcaccgctgtggcatcttccagtacgagaccatctcctgcaacaactgcacagactcgcacgtcgcctgctttggctataactgcgagtcctcggcgcagtggaagtcagctgtccagggcctcctgaactacataaataactggcacaagtaagtcccctcctcaaaccaacacaggcagtgtgtgtatgtgagcacctcgtgggtgagtatgtgtggggcacaggctggctccctcagctcccacgtcctanaggggctcccgaggaggtggaacctcaacccagctctgcgcaggaggcggctgcagtccttttctccctcaaaggtctccgaccctcanctggaggcgggcatctttcctaaaagggtccccatagggtctggttccaccccatcccaggtctgtggtcagagcctgggagggttccctacgatggttaggggtgccccatggaggggctgactgccccacattgcctttcanacaggacacgagcatgaggtaaagcccgcccntgacctggacttcngggggaaggggtnaaaggganaaaaggagggggggcttanggggtcctcttaaatnagtgggggncactgcnnggtgggggctntcccctnanacttgggaaacctggctggaatntnncctntgnaancnnaacccatgtggttggntttcnntnaaaaaaccanncntncttttgncttnctcccggggccngggaannanaanagcccnccccggnncttcttggtatnncccgnccttnaagggnntngganccccccaaccttggccnaccttgancttggaaaannntnnnnaaagtttntaancnnanntgaancanttgggccnncccaaggaaaantg

SEQ ID NO: 466 - DNA, 1200 bp, Homo Sapiens
  misc_feature (893)..(893): n is a, c, g, or t
  misc_feature (934)..(934): n is a, c, g, or t
  misc_feature (939)..(939): n is a, c, g, or t
  misc_feature (987)..(987): n is a, c, g, or t
  misc_feature (998)..(998): n is a, c, g, or t
  misc_feature (1004)..(1004): n is a, c, g, or t
  misc_feature (1041)..(1041): n is a, c, g, or t
  misc_feature (1048)..(1048): n is a, c, g, or t
  misc_feature (1055)..(1056): n is a, c, g, or t
  misc_feature (1060)..(1060): n is a, c, g, or t
  misc_feature (1095)..(1095): n is a, c, g, or t
  misc_feature (1098)..(1098): n is a, c, g, or t
  misc_feature (1108)..(1108): n is a, c, g, or t
  misc_feature (1118)..(1118): n is a, c, g, or t
  misc_feature (1132)..(1132): n is a, c, g, or t
  misc_feature (1136)..(1136): n is a, c, g, or t
  misc_feature (1142)..(1142): n is a, c, g, or t
  misc_feature (1145)..(1145): n is a, c, g, or t
  misc_feature (1151)..(1151): n is a, c, g, or t
  misc_feature (1155)..(1155): n is a, c, g, or t
  misc_feature (1158)..(1158): n is a, c, g, or t
  misc_feature (1165)..(1165): n is a, c, g, or t
  misc_feature (1169)..(1169): n is a, c, g, or t
  misc_feature (1173)..(1175): n is a, c, g, or t
  misc_feature (1183)..(1183): n is a, c, g, or t
  misc_feature (1196)..(1196): n is a, c, g, or t
  misc_feature (1199)..(1199): n is a, c, g, or t
tagagaaattaactatgagaggatcgcatcaccatcaccatcacggatcctatttaggtgacactatagaatcgtcgacccacgcgtccgcgcaagctggcggtgaacatggtgcccttccctcgcctgcacttcttcatgcccggcttcgcgcccctgaccagccggggcagccagcagtaccgggcgctcacggtgcccgagctcacccagcagatgttcgactccaagaacatgatggccgcctgcgacccgcgccacggccgctacctgacggtggctgccatcttccggggccgcatgtccatgaaggaggtggacgagcagatgctcaacgtgcagaacaagaacagcagctacttcgtggagtggatccccaacaacgtgaagacggccgtgtgcgacatcccgccccgcggcctgaagatgtcggccaccttcatcggcaacagcacggccatccaggagctgttcaagcgcatctccgagcagttcacggccatgttccggcgcaaggccttcctgcactggtacacgggcgagggcatggacgagatggagttcaccgaggccgagagcaacatgaacgacctggtgtccgagtaccagcagtaccaggacgccacggccgacgaacaaggggagttcgaggaggaggagggcgaggacgaggcttaaaaacttctcagatcaatcgtgcatccttagtgaacttctgttgtcctcaagcatggtctttctacttgtaaactatggtgctcagttttgcctctgttagaaattcacactgttgatgtaatgatgtggaactcctctaaaaattacagtattgtctgtgaaggtatctatactaataaaaaagcatgtgtaaaaaaaaaaaaaaaaaaaaaaanggcggccgctccctatagtgagtcgtattaagcttaattanctgancttggactcctgttgaaaaatcagtaatgacctcaaaactccatctgnatttttcaaangctcgnttgccgccgggggtttttttggggaaaatccaactancttgggnaattttnngganctaagaaacttaaatggaaaaaaaatcctggaaanccnccgttgaaanttccaatggntctaaaaaaatttnaggnatttcntcngttgtnaagnacntaaaacnaacngttnnntggaattnaggctttttaaancgna

SEQ ID NO: 467 - DNA, 1200 bp, Homo Sapiens; identical to SEQ ID NO: 359
  misc_feature (69)..(69): n is a, c, g, or t
  misc_feature (847)..(847): n is a, c, g, or t
  misc_feature (898)..(898): n is a, c, g, or t
  misc_feature (903)..(903): n is a, c, g, or t
  misc_feature (910)..(910): n is a, c, g, or t
  misc_feature (934)..(934): n is a, c, g, or t
  misc_feature (939)..(939): n is a, c, g, or t
  misc_feature (945)..(945): n is a, c, g, or t
  misc_feature (955)..(955): n is a, c, g, or t
  misc_feature (968)..(968): n is a, c, g, or t
  misc_feature (973)..(973): n is a, c, g, or t
  misc_feature (979)..(979): n is a, c, g, or t
  misc_feature (989)..(989): n is a, c, g, or t
  misc_feature (999)..(999): n is a, c, g, or t
  misc_feature (1004)..(1004): n is a, c, g, or t
  misc_feature (1006)..(1006): n is a, c, g, or t
  misc_feature (1019)..(1020): n is a, c, g, or t
  misc_feature (1023)..(1023): n is a, c, g, or t
  misc_feature (1026)..(1026): n is a, c, g, or t
  misc_feature (1028)..(1028): n is a, c, g, or t
  misc_feature (1030)..(1030): n is a, c, g, or t
  misc_feature (1051)..(1051): n is a, c, g, or t
  misc_feature (1059)..(1059): n is a, c, g, or t
  misc_feature (1065)..(1065): n is a, c, g, or t
  misc_feature (1068)..(1069): n is a, c, g, or t
  misc_feature (1071)..(1071): n is a, c, g, or t
  misc_feature (1073)..(1074): n is a, c, g, or t
  misc_feature (1076)..(1076): n is a, c, g, or t
  misc_feature (1084)..(1084): n is a, c, g, or t
  misc_feature (1090)..(1090): n is a, c, g, or t
  misc_feature (1099)..(1099): n is a, c, g, or t
  misc_feature (1101)..(1101): n is a, c, g, or t
  misc_feature (1105)..(1105): n is a, c, g, or t
  misc_feature (1119)..(1119): n is a, c, g, or t
  misc_feature (1128)..(1128): n is a, c, g, or t
  misc_feature (1131)..(1132): n is a, c, g, or t
  misc_feature (1138)..(1138): n is a, c, g, or t
  misc_feature (1143)..(1143): n is a, c, g, or t
  misc_feature (1146)..(1146): n is a, c, g, or t
  misc_feature (1150)..(1150): n is a, c, g, or t
  misc_feature (1152)..(1155): n is a, c, g, or t
  misc_feature (1159)..(1159): n is a, c, g, or t
  misc_feature (1163)..(1164): n is a, c, g, or t
  misc_feature (1167)..(1167): n is a, c, g, or t
  misc_feature (1172)..(1173): n is a, c, g, or t
  misc_feature (1179)..(1179): n is a, c, g, or t
  misc_feature (1188)..(1188): n is a, c, g, or t
  misc_feature (1190)..(1190): n is a, c, g, or t
  misc_feature (1193)..(1193): n is a, c, g, or t
  misc_feature (1196)..(1196): n is a, c, g, or t
  misc_feature (1200)..(1200): n is a, c, g, or t

SEQ ID NO: 468 - DNA, 1121 bp, Homo Sapiens
atttataaaggagggagaattaactatgagaggatcgcatcaccatcaccatcacggatcctatttaggtgacactatagaatcgtcgacccacgcgtccggacaaatcaagaaacaaactgcacttgttgagctcgtgaaacacaagcccaaggcaacaaaagagcaactgaaagctgttatggatgatttcgcagcttttgtagagaagtgctgcaaggctgacgataaggagacctgctttgccgaggagggtaaaaaacttgttgctgcaagtcaagctgccttaggcttataacatcacatttaaaagcatctcagcctaccatgagaataagagaaagaaaatgaagatcaaaagcttattcatctgtttttctttttcgttggtgtaaagccaacaccctgtctaaaaaacataaatttctttaatcattttgcctcttttctctgtgcttcaattaataaaaaatggaaagaatctaatagagtggtacagcactgttatttttcaaagatgtgttgctatcctgaaaattctgtaggttctgtggaagttccagtgttctctcttattccacttcggtagaggatttctagtttcttgtgggctaattaaataaatcattaatactcttctaaaaaaaaaaaaaaaaaaaaaaaaaaaaaaaaagggcggccgctccctatagtgagtcgtattaagcttaattagctgagcttggactcctgttgatagatccagtaatgacctcagaactccatctggatttgttcagaacgctcggttgccgccgggcgttttttattggtgagaatccaagctagcttggcgagattttcaggagctaaggaagctaaaatggagaaaaaaatcactggatataccaccgttgatatatcccaatggcatcgtaaagaacattttgaggcatttcagtcagttgctcaatgtacctataaccagaccgtcagctggatattacggcctttttaaagaccgtaaagaaaatagcacagtttatccggctttatcacattctgccgctgatgatgctcatcggatttcgtatggcatgaagacgtgagctggtgaaatggatagtgtcacccttgtaaaa

SEQ ID NO: 469 - DNA, 1254 bp, Homo Sapiens; identical to SEQ ID NO: 309
  misc_feature (141)..(141): n is a, c, g, or t
  misc_feature (143)..(143): n is a, c, g, or t
  misc_feature (160)..(160): n is a, c, g, or t
  misc_feature (194)..(194): n is a, c, g, or t
  misc_feature (205)..(205): n is a, c, g, or t
  misc_feature (211)..(213): n is a, c, g, or t
  misc_feature (215)..(215): n is a, c, g, or t
  misc_feature (245)..(245): n is a, c, g, or t
  misc_feature (254)..(254): n is a, c, g, or t
  misc_feature (268)..(269): n is a, c, g, or t
  misc_feature (289)..(289): n is a, c, g, or t
  misc_feature (296)..(296): n is a, c, g, or t
  misc_feature (305)..(306): n is a, c, g, or t
  misc_feature (308)..(308): n is a, c, g, or t
  misc_feature (317)..(318): n is a, c, g, or t
  misc_feature (320)..(321): n is a, c, g, or t
  misc_feature (330)..(330): n is a, c, g, or t
  misc_feature (332)..(332): n is a, c, g, or t
  misc_feature (335)..(335): n is a, c, g, or t
  misc_feature (347)..(347): n is a, c, g, or t
  misc_feature (353)..(353): n is a, c, g, or t
  misc_feature (377)..(377): n is a, c, g, or t
  misc_feature (384)..(384): n is a, c, g, or t
  misc_feature (392)..(392): n is a, c, g, or t
  misc_feature (395)..(395): n is a, c, g, or t
  misc_feature (405)..(405): n is a, c, g, or t
  misc_feature (425)..(425): n is a, c, g, or t
  misc_feature (427)..(427): n is a, c, g, or t
  misc_feature (437)..(438): n is a, c, g, or t
  misc_feature (444)..(444): n is a, c, g, or t
  misc_feature (448)..(448): n is a, c, g, or t
  misc_feature (459)..(459): n is a, c, g, or t
  misc_feature (482)..(482): n is a, c, g, or t
  misc_feature (487)..(488): n is a, c, g, or t
  misc_feature (490)..(491): n is a, c, g, or t
  misc_feature (494)..(494): n is a, c, g, or t
  misc_feature (523)..(523): n is a, c, g, or t
  misc_feature (527)..(527): n is a, c, g, or t
  misc_feature (532)..(533): n is a, c, g, or t
  misc_feature (539)..(539): n is a, c, g, or t
  misc_feature (544)..(544): n is a, c, g, or t
  misc_feature (548)..(548): n is a, c, g, or t
  misc_feature (550)..(550): n is a, c, g, or t
  misc_feature (574)..(574): n is a, c, g, or t
  misc_feature (577)..(578): n is a, c, g, or t
  misc_feature (589)..(589): n is a, c, g, or t
  misc_feature (591)..(591): n is a, c, g, or t
  misc_feature (612)..(612): n is a, c, g, or t
  misc_feature (623)..(623): n is a, c, g, or t
  misc_feature (626)..(626): n is a, c, g, or t
  misc_feature (633)..(634): n is a, c, g, or t
  misc_feature (677)..(677): n is a, c, g, or t
  misc_feature (681)..(681): n is a, c, g, or t
  misc_feature (716)..(716): n is a, c, g, or t
  misc_feature (744)..(744): n is a, c, g, or t
  misc_feature (756)..(756): n is a, c, g, or t
  misc_feature (758)..(758): n is a, c, g, or t
  misc_feature (770)..(770): n is a, c, g, or t
  misc_feature (782)..(783): n is a, c, g, or t
  misc_feature (787)..(787): n is a, c, g, or t
  misc_feature (789)..(789): n is a, c, g, or t
  misc_feature (805)..(805): n is a, c, g, or t
  misc_feature (807)..(807): n is a, c, g, or t
  misc_feature (815)..(815): n is a, c, g, or t
  misc_feature (825)..(825): n is a, c, g, or t
  misc_feature (841)..(842): n is a, c, g, or t
  misc_feature (844)..(844): n is a, c, g, or t
  misc_feature (848)..(848): n is a, c, g, or t
  misc_feature (865)..(866): n is a, c, g, or t
  misc_feature (873)..(876): n is a, c, g, or t
  misc_feature (879)..(879): n is a, c, g, or t
  misc_feature (887)..(887): n is a, c, g, or t
  misc_feature (891)..(891): n is a, c, g, or t
  misc_feature (911)..(911): n is a, c, g, or t
  misc_feature (922)..(922): n is a, c, g, or t
  misc_feature (934)..(934): n is a, c, g, or t
  misc_feature (940)..(940): n is a, c, g, or t
  misc_feature (944)..(944): n is a, c, g, or t
  misc_feature (947)..(948): n is a, c, g, or t
  misc_feature (959)..(959): n is a, c, g, or t
  misc_feature (961)..(961): n is a, c, g, or t
  misc_feature (965)..(965): n is a, c, g, or t
  misc_feature (967)..(968): n is a, c, g, or t
  misc_feature (973)..(973): n is a, c, g, or t
  misc_feature (979)..(979): n is a, c, g, or t
  misc_feature (984)..(985): n is a, c, g, or t
  misc_feature (988)..(988): n is a, c, g, or t
  misc_feature (1000)..(1002): n is a, c, g, or t
  misc_feature (1008)..(1008): n is a, c, g, or t
  misc_feature (1013)..(1013): n is a, c, g, or t
  misc_feature (1023)..(1023): n is a, c, g, or t
  misc_feature (1036)..(1036): n is a, c, g, or t
  misc_feature (1040)..(1040): n is a, c, g, or t
  misc_feature (1042)..(1042): n is a, c, g, or t
  misc_feature (1045)..(1045): n is a, c, g, or t
  misc_feature (1063)..(1063): n is a, c, g, or t
  misc_feature (1067)..(1067): n is a, c, g, or t
  misc_feature (1069)..(1069): n is a, c, g, or t
  misc_feature (1075)..(1075): n is a, c, g, or t
  misc_feature (1079)..(1079): n is a, c, g, or t
  misc_feature (1082)..(1082): n is a, c, g, or t
  misc_feature (1094)..(1094): n is a, c, g, or t
  misc_feature (1096)..(1096): n is a, c, g, or t
  misc_feature (1100)..(1100): n is a, c, g, or t
  misc_feature (1103)..(1103): n is a, c, g, or t
  misc_feature (1106)..(1107): n is a, c, g, or t
  misc_feature (1112)..(1112): n is a, c, g, or t
  misc_feature (1115)..(1115): n is a, c, g, or t
  misc_feature (1117)..(1118): n is a, c, g, or t
  misc_feature (1125)..(1125): n is a, c, g, or t
  misc_feature (1129)..(1129): n is a, c, g, or t
  misc_feature (1132)..(1133): n is a, c, g, or t
  misc_feature (1135)..(1136): n is a, c, g, or t
  misc_feature (1140)..(1141): n is a, c, g, or t
  misc_feature (1143)..(1143): n is a, c, g, or t
  misc_feature (1146)..(1146): n is a, c, g, or t
  misc_feature (1150)..(1151): n is a, c, g, or t
  misc_feature (1153)..(1153): n is a, c, g, or t
  misc_feature (1158)..(1159): n is a, c, g, or t
  misc_feature (1169)..(1169): n is a, c, g, or t
  misc_feature (1174)..(1174): n is a, c, g, or t
  misc_feature (1176)..(1176): n is a, c, g, or t
  misc_feature (1184)..(1184): n is a, c, g, or t
  misc_feature (1187)..(1187): n is a, c, g, or t
  misc_feature (1191)..(1191): n is a, c, g, or t
  misc_feature (1193)..(1193): n is a, c, g, or t
  misc_feature (1196)..(1197): n is a, c, g, or t
  misc_feature (1199)..(1201): n is a, c, g, or t
  misc_feature (1204)..(1204): n is a, c, g, or t
  misc_feature (1211)..(1211): n is a, c, g, or t
  misc_feature (1215)..(1215): n is a, c, g, or t
  misc_feature (1219)..(1219): n is a, c, g, or t
  misc_feature (1223)..(1223): n is a, c, g, or t
  misc_feature (1226)..(1226): n is a, c, g, or t
  misc_feature (1231)..(1231): n is a, c, g, or t
  misc_feature (1233)..(1234): n is a, c, g, or t
  misc_feature (1236)..(1237): n is a, c, g, or t
  misc_feature (1239)..(1239): n is a, c, g, or t
  misc_feature (1246)..(1247): n is a, c, g, or t
  misc_feature (1251)..(1251): n is a, c, g, or t

SEQ ID NO: 470 - DNA, 1382 bp, Homo Sapiens
  misc_feature (775)..(775): n is a, c, g, or t
  misc_feature (817)..(817): n is a, c, g, or t
  misc_feature (841)..(841): n is a, c, g, or t
  misc_feature (844)..(844): n is a, c, g, or t
  misc_feature (863)..(863): n is a, c, g, or t
  misc_feature (869)..(869): n is a, c, g, or t
  misc_feature (883)..(883): n is a, c, g, or t
  misc_feature (920)..(920): n is a, c, g, or t
  misc_feature (931)..(931): n is a, c, g, or t
  misc_feature (934)..(934): n is a, c, g, or t
  misc_feature (951)..(951): n is a, c, g, or t
  misc_feature (961)..(961): n is a, c, g, or t
  misc_feature (967)..(967): n is a, c, g, or t
  misc_feature (971)..(971): n is a, c, g, or t
  misc_feature (979)..(979): n is a, c, g, or t
  misc_feature (987)..(987): n is a, c, g, or t
  misc_feature (999)..(999): n is a, c, g, or t
  misc_feature (1001)..(1002): n is a, c, g, or t
  misc_feature (1007)..(1007): n is a, c, g, or t
  misc_feature (1013)..(1013): n is a, c, g, or t
  misc_feature (1018)..(1019): n is a, c, g, or t
  misc_feature (1023)..(1024): n is a, c, g, or t
  misc_feature (1026)..(1026): n is a, c, g, or t
  misc_feature (1029)..(1030): n is a, c, g, or t
  misc_feature (1037)..(1037): n is a, c, g, or t
  misc_feature (1043)..(1043): n is a, c, g, or t
  misc_feature (1058)..(1058): n is a, c, g, or t
  misc_feature (1061)..(1062): n is a, c, g, or t
  misc_feature (1082)..(1082): n is a, c, g, or t
  misc_feature (1084)..(1084): n is a, c, g, or t
  misc_feature (1086)..(1086): n is a, c, g, or t
  misc_feature (1094)..(1096): n is a, c, g, or t
  misc_feature (1098)..(1098): n is a, c, g, or t
  misc_feature (1109)..(1114): n is a, c, g, or t
  misc_feature (1117)..(1118): n is a, c, g, or t
  misc_feature (1121)..(1121): n is a, c, g, or t
  misc_feature (1123)..(1124): n is a, c, g, or t
  misc_feature (1128)..(1130): n is a, c, g, or t
  misc_feature (1133)..(1135): n is a, c, g, or t
  misc_feature (1139)..(1141): n is a, c, g, or t
  misc_feature (1144)..(1147): n is a, c, g, or t
  misc_feature (1153)..(1153): n is a, c, g, or t
  misc_feature (1155)..(1156): n is a, c, g, or t
  misc_feature (1160)..(1162): n is a, c, g, or t
  misc_feature (1164)..(1165): n is a, c, g, or t
  misc_feature (1169)..(1169): n is a, c, g, or t
  misc_feature (1171)..(1171): n is a, c, g, or t
  misc_feature (1177)..(1180): n is a, c, g, or t
  misc_feature (1184)..(1186): n is a, c, g, or t
  misc_feature (1191)..(1194): n is a, c, g, or t
  misc_feature (1197)..(1202): n is a, c, g, or t
  misc_feature (1204)..(1207): n is a, c, g, or t
  misc_feature (1209)..(1209): n is a, c, g, or t
  misc_feature (1211)..(1220): n is a, c, g, or t
  misc_feature (1222)..(1223): n is a, c, g, or t
  misc_feature (1225)..(1234): n is a, c, g, or t
  misc_feature (1239)..(1243): n is a, c, g, or t
  misc_feature (1245)..(1249): n is a, c, g, or t
  misc_feature (1251)..(1251): n is a, c, g, or t
  misc_feature (1254)..(1261): n is a, c, g, or t
  misc_feature (1264)..(1264): n is a, c, g, or t
  misc_feature (1266)..(1266): n is a, c, g, or t
  misc_feature (1268)..(1276): n is a, c, g, or t
  misc_feature (1278)..(1282): n is a, c, g, or t
  misc_feature (1284)..(1292): n is a, c, g, or t
  misc_feature (1298)..(1308): n is a, c, g, or t
  misc_feature (1312)..(1312): n is a, c, g, or t
  misc_feature (1319)..(1320): n is a, c, g, or t
  misc_feature (1322)..(1336): n is a, c, g, or t
  misc_feature (1339)..(1358): n is a, c, g, or t
  misc_feature (1360)..(1360): n is a, c, g, or t
  misc_feature (1362)..(1381): n is a, c, g, or t
gagaaattactatgagaggatcgcatcaccatcaccatcacgggatcctatttaggtgacactatagaatcgtcgacccacgcgtccgcccacgcgtccgcatccccgaggtccccagcgaggacacacactccacgagagcagcccctccactctgcccaggagaggggccgaccctcctcgggaaccggccacccgcgtggctcccagcatccatcaggacaagcccacgtggggtcctccctgcgtgctcagagggtctgtccagccctgggaagcgaccttggcctcagttcacagcctggtgctcatctgctggcaccgggcatccacccatcagcccccgccctgtccctccgaaggacacccagcaggcaccccccggggaggcaggggcagaggtcagaaggggtgtctgggacctggatggccagcagggacaggggcattgtcatctcaaaggcccaacccccagaggccacaccagtcctcccagggagtcctcgagtcgccctgcccagagccctggcaccagagacgccaagagcctgtggggtgactcggagcagcaggtgtggccccgggcgggcggcaccgcgtccagggcagcctccctccgctgagtgacacgggacaccagtgcccggccgacgcgcctttgcaggagaaatgtgcaaacctctgtggataccatttcatttccattcttgtgttgtctccaaggcccctttggagatatacttggtgttggttgtgttttttggttccttttcanaaaactgtaaaccgaggctgacgtgctccactgactgtgccnaggggcggggggcaggaggacggnaanacctatttataatatttancgaaantcggtctccctcanatcccccgcgagggaaggctgctggaacccaccccgnttgtcccccanganaaaaattttgtaaatanctttggtgancaatgnccantttccctnctgggttnacctctgatggntnnttgtncattgnaaaanntggnnangtnnaaatttnttgtantgtaaaaaataaaanggnntttgttttaaaatgaaaaangngnaaaatttnnntntgttttttggnnnnnnttnntcncnntaannnttnnnaaannnttnnnntttccncnnaaannngnntaangnaaaatnnnntttnnntgggnnnnttnnnnnngnnnngntnnnnnnnnnntnntnnnnnnnnnnaaaannnnngnnnnntnttnnnnnnnnggntnannnnnnnnntnnnnnannnnnnnnntttttnnnnnnnnnnntttnaaaaaannannnnnnnnnnnnnnnttnnnnnnnnnnnnnnnnnnnntntnnnnnnnnnnnnnnnnnnnna

SEQ ID NO: 471 - DNA, 1405 bp, Homo Sapiens
  misc_feature (770)..(770): n is a, c, g, or t
  misc_feature (805)..(805): n is a, c, g, or t
  misc_feature (823)..(823): n is a, c, g, or t
  misc_feature (848)..(848): n is a, c, g, or t
  misc_feature (851)..(851): n is a, c, g, or t
  misc_feature (858)..(858): n is a, c, g, or t
  misc_feature (870)..(870): n is a, c, g, or t
  misc_feature (901)..(902): n is a, c, g, or t
  misc_feature (911)..(911): n is a, c, g, or t
  misc_feature (915)..(915): n is a, c, g, or t
  misc_feature (921)..(921): n is a, c, g, or t
  misc_feature (934)..(934): n is a, c, g, or t
  misc_feature (938)..(938): n is a, c, g, or t
  misc_feature (953)..(953): n is a, c, g, or t
  misc_feature (972)..(972): n is a, c, g, or t
  misc_feature (974)..(975): n is a, c, g, or t
  misc_feature (992)..(992): n is a, c, g, or t
  misc_feature (998)..(998): n is a, c, g, or t
  misc_feature (1001)..(1001): n is a, c, g, or t
  misc_feature (1006)..(1006): n is a, c, g, or t
  misc_feature (1014)..(1014): n is a, c, g, or t
  misc_feature (1028)..(1028): n is a, c, g, or t
  misc_feature (1031)..(1032): n is a, c, g, or t
  misc_feature (1034)..(1049): n is a, c, g, or t
  misc_feature (1051)..(1052): n is a, c, g, or t
  misc_feature (1060)..(1060): n is a, c, g, or t
  misc_feature (1065)..(1065): n is a, c, g, or t
  misc_feature (1069)..(1069): n is a, c, g, or t
  misc_feature (1074)..(1074): n is a, c, g, or t
  misc_feature (1077)..(1077): n is a, c, g, or t
  misc_feature (1085)..(1085): n is a, c, g, or t
  misc_feature (1089)..(1089): n is a, c, g, or t
  misc_feature (1099)..(1099): n is a, c, g, or t
  misc_feature (1106)..(1107): n is a, c, g, or t
  misc_feature (1111)..(1112): n is a, c, g, or t
  misc_feature (1116)..(1116): n is a, c, g, or t
  misc_feature (1119)..(1119): n is a, c, g, or t
  misc_feature (1123)..(1125): n is a, c, g, or t
  misc_feature (1128)..(1128): n is a, c, g, or t
  misc_feature (1131)..(1131): n is a, c, g, or t
  misc_feature (1134)..(1134): n is a, c, g, or t
  misc_feature (1144)..(1144): n is a, c, g, or t
  misc_feature (1151)..(1151): n is a, c, g, or t
  misc_feature (1158)..(1158): n is a, c, g, or t
  misc_feature (1162)..(1168): n is a, c, g, or t
  misc_feature (1172)..(1172): n is a, c, g, or t
  misc_feature (1177)..(1177): n is a, c, g, or t
  misc_feature (1180)..(1181): n is a, c, g, or t
  misc_feature (1194)..(1195): n is a, c, g, or t
  misc_feature (1197)..(1197): n is a, c, g, or t
  misc_feature (1201)..(1201): n is a, c, g, or t
  misc_feature (1203)..(1203): n is a, c, g, or t
  misc_feature (1205)..(1210): n is a, c, g, or t
  misc_feature (1216)..(1217): n is a, c, g, or t
  misc_feature (1221)..(1221): n is a, c, g, or t
  misc_feature (1226)..(1228): n is a, c, g, or t
  misc_feature (1230)..(1232): n is a, c, g, or t
  misc_feature (1234)..(1235): n is a, c, g, or t
  misc_feature (1238)..(1241): n is a, c, g, or t
  misc_feature (1244)..(1248): n is a, c, g, or t
  misc_feature (1250)..(1250): n is a, c, g, or t
  misc_feature (1256)..(1260): n is a, c, g, or t
  misc_feature (1262)..(1265): n is a, c, g, or t
  misc_feature (1267)..(1273): n is a, c, g, or t
  misc_feature (1278)..(1279): n is a, c, g, or t
  misc_feature (1281)..(1286): n is a, c, g, or t
  misc_feature (1288)..(1293): n is a, c, g, or t
  misc_feature (1304)..(1304): n is a, c, g, or t
  misc_feature (1307)..(1308): n is a, c, g, or t
  misc_feature (1311)..(1316): n is a, c, g, or t
  misc_feature (1318)..(1324): n is a, c, g, or t
  misc_feature (1326)..(1327): n is a, c, g, or t
  misc_feature (1329)..(1329): n is a, c, g, or t
  misc_feature (1332)..(1332): n is a, c, g, or t
  misc_feature (1336)..(1337): n is a, c, g, or t
  misc_feature (1339)..(1344): n is a, c, g, or t
  misc_feature (1346)..(1346): n is a, c, g, or t
  misc_feature (1348)..(1353): n is a, c, g, or t
  misc_feature (1358)..(1358): n is a, c, g, or t
  misc_feature (1360)..(1363): n is a, c, g, or t
  misc_feature (1366)..(1366): n is a, c, g, or t
  misc_feature (1372)..(1376): n is a, c, g, or t
  misc_feature (1381)..(1386): n is a, c, g, or t
  misc_feature (1392)..(1392): n is a, c, g, or t
  misc_feature (1398)..(1398): n is a, c, g, or t
  misc_feature (1400)..(1403): n is a, c, g, or t
tgagaaattactatgagaggatcgcatcaccatcaccatcacggatcctatttaggtgacactatagaatcgtcgacccacgcgtccgcaggggcgtgcagcccgcttgccaatcagagcgcggctgagcggccccgcagccaacccccgaggagcggccggctggcgtccgccgcgcccaggagttggggatgtcctacaaacccatcgcccctgctcccagcagcacccctggctccagcacccctgggccgggcaccccggtccctacaggaagcgtcccgtcgccgtcgggctcagtgccaggagccggcgctcctttcagaccgctgtttaacgactttggaccgccttccatgggctacgtgcaggcgatgaagccacccggcgcccagggctcccagagcacctacacggacctgctgtcagtcatagaggagatgggcaaagagatccggcctacctatgctggcagcaagagcgccatggagcgcctgaagagaggtatcatccatgcccgggccctagtcagagagtgcctggcagagacagagcggaacgcccgcacgtaacaggaagcgcctcggcctcagcgtctggacctatccggccactgcagagcacccgcttctccctggccttcatcccgagttgcactaaccatcctgggcttcctgtcctgtgtcccttggtgggtcccctccaggaaccaaggagtggccctccaggtggcagcactaaggacacccccccacaacaagagttagcancgaggtccccatgagtcccacccatgacctgcccnacagtgttgcccaccggnaacttttgtggcccctaccgctcanccnttcccancacttctcccanttttgtcccgaagcctccttcttcccccaannaaggggcanaggncttggnaacctccctggcnttgngtcctgaaacaaaangaactcttttatctggggngnnttttgcaaaaaatgccntttttntanttaanaaaaaaanattttgaaaaaaanaannannnnnnnnnnnnnnnngnngggccccnccctnaaanggaantcnaattaaancttnattaattgantttgganncctnntttnaantccnnnaanganccncaaaactccnttttganttttttnaaannnnnnntttnccccnggnntttttttttttgnngnaaancnannnnnntttggnnaaanttttnnnannnannaannnnaannnnnanaaaaannnnngnnnnannnnnnnttaanntnnnnnngnnnnnnaaaaaattttnagnnttnnnnnntnnnnnnnannanaanaaanntnnnnnnantnnnnnnttttnannnnaanaaaaannnnnttttnnnnnntttttntttttncnnnnaa

SEQ ID NO: 472 - DNA, 1429 bp, Homo Sapiens
  misc_feature (869)..(869): n is a, c, g, or t
  misc_feature (950)..(950): n is a, c, g, or t
  misc_feature (979)..(979): n is a, c, g, or t
  misc_feature (1000)..(1000): n is a, c, g, or t
  misc_feature (1004)..(1004): n is a, c, g, or t
  misc_feature (1006)..(1006): n is a, c, g, or t
  misc_feature (1008)..(1008): n is a, c, g, or t
  misc_feature (1015)..(1015): n is a, c, g, or t
  misc_feature (1017)..(1017): n is a, c, g, or t
  misc_feature (1020)..(1020): n is a, c, g, or t
  misc_feature (1024)..(1024): n is a, c, g, or t
  misc_feature (1064)..(1064): n is a, c, g, or t
  misc_feature (1067)..(1067): n is a, c, g, or t
  misc_feature (1069)..(1069): n is a, c, g, or t
  misc_feature (1079)..(1079): n is a, c, g, or t
  misc_feature (1081)..(1081): n is a, c, g, or t
  misc_feature (1086)..(1086): n is a, c, g, or t
  misc_feature (1088)..(1088): n is a, c, g, or t
  misc_feature (1097)..(1098): n is a, c, g, or t
  misc_feature (1103)..(1103): n is a, c, g, or t
  misc_feature (1115)..(1115): n is a, c, g, or t
  misc_feature (1129)..(1129): n is a, c, g, or t
  misc_feature (1156)..(1157): n is a, c, g, or t
  misc_feature (1174)..(1174): n is a, c, g, or t
  misc_feature (1182)..(1182): n is a, c, g, or t
  misc_feature (1211)..(1211): n is a, c, g, or t
  misc_feature (1213)..(1213): n is a, c, g, or t
  misc_feature (1216)..(1216): n is a, c, g, or t
  misc_feature (1219)..(1219): n is a, c, g, or t
  misc_feature (1226)..(1226): n is a, c, g, or t
  misc_feature (1230)..(1230): n is a, c, g, or t
  misc_feature (1232)..(1232): n is a, c, g, or t
  misc_feature (1253)..(1253): n is a, c, g, or t
  misc_feature (1259)..(1259): n is a, c, g, or t
  misc_feature (1262)..(1262): n is a, c, g, or t
  misc_feature (1264)..(1264): n is a, c, g, or t
  misc_feature (1266)..(1266): n is a, c, g, or t
  misc_feature (1271)..(1272): n is a, c, g, or t
  misc_feature (1275)..(1275): n is a, c, g, or t
  misc_feature (1278)..(1278): n is a, c, g, or t
  misc_feature (1288)..(1288): n is a, c, g, or t
  misc_feature (1290)..(1290): n is a, c, g, or t
  misc_feature (1297)..(1297): n is a, c, g, or t
  misc_feature (1300)..(1300): n is a, c, g, or t
  misc_feature (1302)..(1302): n is a, c, g, or t
  misc_feature (1304)..(1304): n is a, c, g, or t
  misc_feature (1319)..(1320): n is a, c, g, or t
  misc_feature (1329)..(1329): n is a, c, g, or t
  misc_feature (1336)..(1336): n is a, c, g, or t
  misc_feature (1346)..(1346): n is a, c, g, or t
  misc_feature (1359)..(1361): n is a, c, g, or t
  misc_feature (1373)..(1373): n is a, c, g, or t
  misc_feature (1379)..(1379): n is a, c, g, or t
  misc_feature (1386)..(1386): n is a, c, g, or t
  misc_feature (1392)..(1392): n is a, c, g, or t
  misc_feature (1399)..(1400): n is a, c, g, or t
  misc_feature (1405)..(1405): n is a, c, g, or t
  misc_feature (1407)..(1407): n is a, c, g, or t
  misc_feature (1415)..(1415): n is a, c, g, or t
  misc_feature (1424)..(1425): n is a, c, g, or t
  misc_feature (1429)..(1429): n is a, c, g, or t
tagagaaattactatgagaggatcgcatcaccatcaccatcacggatcctatttaggtgacactatagaatcgtcgacccacgcgtccggtttaatggatcgagaagtggcgttgcttgctgaaatggacaaagtgaaagctgaagcaatggaaattttgctcagccgacaaaagaaggctgaacttctaaagaagatgactcatgtggctgttcaaatgtcagagcagcaattggttgagctcagagctgatatcaagcactttgttagtgaacgtaaatatgatgaggatctgggacgagtagcccggttcacctgtgatgtagagaccctaaagaagagcattgattcatttggacaagtgtctcatccaaagaacagctattcgaccagatcccgatgtagctcagttacatctgtgtccttgagtagcccaagtgatgcctctgctgcttcctcttccacctgtgcctctcctcccagccttacaagtgctaacaagaaaaactttgcaccgggagagactcctgcagccatagcaaactccagtggccagccctaccagccacttcgggaggtattgccagggaacagacgaggaggacagggctataggccacaaggccaaaagtccaatgaccccatgaaccaagggcggcatgacagtatgggtcgttacagaaacagctcgtggtattcatctggttccaggtatcagagtgctccatctcaggcaccaggaaacaccattgaaagaggccagactcactctgcagggaccaatggaactggagtcagcatggagcccagccctcccacgccttcattcaaaaaaggggctcccccagcgcaaacccaggacctctcanactgaagccgtgaactcttgaaaagaaaatcccagttggcctctctcctctatccacacaatttcaacttggataactggnactttaagaaacttacagttagatgtaanaacaaaaaagaagtttatgcngtancncntttttgngnccnttcnaaagtaaaaaaaaaaaaaaaaaaaaaaaaaaaaggggcgnccncnccctaaaggnanccgantnaaccttaannaaccnaacttggacccnggtggaaaaatccngaaagacccccaaacccctttggattnnttcaaaaccccggtggnccccgggntttttttttgggaaaacccacctacttgngnaanttncggaccnaggnantaaagggaaaaaatcccgggnaacccnctntnanttccnnggnccnaaaaaaattngnggtttcnccntncnaggccaaacaaaagnncgggaaaanctttaancgaaaaaaancattttccccctnnnctttccccgaantccccnattttanaaaaangggggtnngaaancncctttccnttcaaaaanntttn

SEQ ID NO: 473 - DNA, 1192 bp, Homo Sapiens
aacctttaaaggaggagaattaactatgagaggtcgcatcaccatcaccatcacggatcctatttaggtgacactatagaatcgtcgacccacgcgtccgggcccagagatcggatgaagcttagcaacacaagcaaaatctgtattgtccatggctgttcagaagcattgcggttacctcaccaggcagtgttgaagaggctatcacagaagcctcagggtagtggttttcaataggtgcccccaaaccactggtgttcctttaaatggtccttgcaagattgtccccagctcactgaatcagcgtgcgaactcggattcacttacagctggcattcaaaaggagacacagggctgtgacttgttcacaagatcaggcaaggcacaaaccagcttgtagtggcagcttgaggatggcatcaggtggtgattgtaattatttttagagttacaagatcctgggtaaagtgttaaaatgccaatagccacaacacagagtatcttcttagagaaccaagtgagagtctgttgagtcaagtcctaggctgtggatggggactaggagatcacatgtgatagtccccttcagagcacagtctgaacagtctgaacaggaaggaggacttcggaggcatggtagccacggaaacgtgagcctcacctcttcagtgctgcccccagaaatccgccaccactgcacgtgcttcccagtgcaccatggacagcaccgctaagctcccagtgcaggactgttcctgggagacacggggccctccgagtatgcatctgacagcctggctgagcgcacctagaaatgcagtgcagtcttagatgtaccccaccttcgctgcccccctcccctgtgccctaactgtgttgatgtcctccagtgctcccagctccctcctgccctccctgtcttccctcacaggcttagtccctaatcaatctcttacctagctgtttccatctggatgtctgcttctcagaggatgccagtaaacacaggaggccatgagctcaccccgaggggttccattgctccgagcatctttggagcagccctcatgcagcatggggctgtgggctgctgtctctgtggttctgtgatttgggagctcgggagccacgggtcactcctagcatcatgtgcacagtcacaaagtgagttcacctctccagcttcctcagg

SEQ ID NO: 474 - DNA, 1200 bp, Homo Sapiens; identical to SEQ ID NO: 220
  misc_feature (788)..(788): n is a, c, g, or t
  misc_feature (800)..(800): n is a, c, g, or t
  misc_feature (826)..(826): n is a, c, g, or t
  misc_feature (832)..(832): n is a, c, g, or t
  misc_feature (842)..(842): n is a, c, g, or t
  misc_feature (870)..(870): n is a, c, g, or t
  misc_feature (882)..(882): n is a, c, g, or t
  misc_feature (890)..(890): n is a, c, g, or t
  misc_feature (902)..(902): n is a, c, g, or t
  misc_feature (919)..(919): n is a, c, g, or t
  misc_feature (936)..(936): n is a, c, g, or t
  misc_feature (938)..(938): n is a, c, g, or t
  misc_feature (944)..(944): n is a, c, g, or t
  misc_feature (950)..(950): n is a, c, g, or t
  misc_feature (955)..(955): n is a, c, g, or t
  misc_feature (966)..(967): n is a, c, g, or t
  misc_feature (975)..(975): n is a, c, g, or t
  misc_feature (981)..(982): n is a, c, g, or t
  misc_feature (986)..(986): n is a, c, g, or t
  misc_feature (990)..(990): n is a, c, g, or t
  misc_feature (993)..(993): n is a, c, g, or t
  misc_feature (1000)..(1000): n is a, c, g, or t
  misc_feature (1004)..(1005): n is a, c, g, or t
  misc_feature (1010)..(1010): n is a, c, g, or t
  misc_feature (1012)..(1012): n is a, c, g, or t
  misc_feature (1023)..(1023): n is a, c, g, or t
  misc_feature (1033)..(1033): n is a, c, g, or t
  misc_feature (1035)..(1036): n is a, c, g, or t
  misc_feature (1038)..(1040): n is a, c, g, or t
  misc_feature (1044)..(1045): n is a, c, g, or t
  misc_feature (1049)..(1050): n is a, c, g, or t
  misc_feature (1057)..(1058): n is a, c, g, or t
  misc_feature (1062)..(1063): n is a, c, g, or t
  misc_feature (1065)..(1065): n is a, c, g, or t
  misc_feature (1067)..(1069): n is a, c, g, or t
  misc_feature (1071)..(1071): n is a, c, g, or t
  misc_feature (1077)..(1077): n is a, c, g, or t
  misc_feature (1083)..(1087): n is a, c, g, or t
  misc_feature (1090)..(1092): n is a, c, g, or t
  misc_feature (1096)..(1096): n is a, c, g, or t
  misc_feature (1099)..(1099): n is a, c, g, or t
  misc_feature (1101)..(1101): n is a, c, g, or t
  misc_feature (1104)..(1104): n is a, c, g, or t
  misc_feature (1106)..(1107): n is a, c, g, or t
  misc_feature (1114)..(1116): n is a, c, g, or t
  misc_feature (1118)..(1118): n is a, c, g, or t
  misc_feature (1123)..(1127): n is a, c, g, or t
  misc_feature (1130)..(1135): n is a, c, g, or t
  misc_feature (1138)..(1141): n is a, c, g, or t
  misc_feature (1144)..(1146): n is a, c, g, or t
  misc_feature (1150)..(1151): n is a, c, g, or t
  misc_feature (1156)..(1159): n is a, c, g, or t
  misc_feature (1162)..(1163): n is a, c, g, or t
  misc_feature (1166)..(1168): n is a, c, g, or t
  misc_feature (1170)..(1175): n is a, c, g, or t
  misc_feature (1177)..(1181): n is a, c, g, or t
  misc_feature (1183)..(1184): n is a, c, g, or t
  misc_feature (1186)..(1188): n is a, c, g, or t
  misc_feature (1190)..(1193): n is a, c, g, or t
  misc_feature (1195)..(1195): n is a, c, g, or t
  misc_feature (1197)..(1198): n is a, c, g, or t

SEQ ID NO: 475 - DNA, 1345 bp, Homo Sapiens
  misc_feature (933)..(933): n is a, c, g, or t
  misc_feature (962)..(962): n is a, c, g, or t
  misc_feature (977)..(977): n is a, c, g, or t
  misc_feature (980)..(980): n is a, c, g, or t
  misc_feature (1005)..(1005): n is a, c, g, or t
  misc_feature (1021)..(1021): n is a, c, g, or t
  misc_feature (1039)..(1039): n is a, c, g, or t
  misc_feature (1062)..(1062): n is a, c, g, or t
  misc_feature (1074)..(1074): n is a, c, g, or t
  misc_feature (1089)..(1089): n is a, c, g, or t
  misc_feature (1093)..(1093): n is a, c, g, or t
  misc_feature (1096)..(1096): n is a, c, g, or t
  misc_feature (1099)..(1099): n is a, c, g, or t
  misc_feature (1103)..(1104): n is a, c, g, or t
  misc_feature (1106)..(1106): n is a, c, g, or t
  misc_feature (1110)..(1110): n is a, c, g, or t
  misc_feature (1112)..(1113): n is a, c, g, or t
  misc_feature (1117)..(1117): n is a, c, g, or t
  misc_feature (1124)..(1124): n is a, c, g, or t
  misc_feature (1136)..(1136): n is a, c, g, or t
  misc_feature (1139)..(1140): n is a, c, g, or t
  misc_feature (1142)..(1143): n is a, c, g, or t
  misc_feature (1165)..(1165): n is a, c, g, or t
  misc_feature (1180)..(1180): n is a, c, g, or t
  misc_feature (1184)..(1184): n is a, c, g, or t
  misc_feature (1186)..(1186): n is a, c, g, or t
  misc_feature (1189)..(1189): n is a, c, g, or t
  misc_feature (1192)..(1192): n is a, c, g, or t
  misc_feature (1194)..(1194): n is a, c, g, or t
  misc_feature (1206)..(1206): n is a, c, g, or t
  misc_feature (1210)..(1211): n is a, c, g, or t
  misc_feature (1222)..(1222): n is a, c, g, or t
  misc_feature (1226)..(1226): n is a, c, g, or t
  misc_feature (1228)..(1229): n is a, c, g, or t
  misc_feature (1237)..(1238): n is a, c, g, or t
  misc_feature (1248)..(1248): n is a, c, g, or t
  misc_feature (1253)..(1253): n is a, c, g, or t
  misc_feature (1257)..(1257): n is a, c, g, or t
  misc_feature (1260)..(1262): n is a, c, g, or t
  misc_feature (1266)..(1268): n is a, c, g, or t
  misc_feature (1270)..(1270): n is a, c, g, or t
  misc_feature (1274)..(1275): n is a, c, g, or t
  misc_feature (1279)..(1280): n is a, c, g, or t
  misc_feature (1287)..(1289): n is a, c, g, or t
  misc_feature (1291)..(1292): n is a, c, g, or t
  misc_feature (1298)..(1298): n is a, c, g, or t
  misc_feature (1307)..(1307): n is a, c, g, or t
  misc_feature (1311)..(1312): n is a, c, g, or t
  misc_feature (1316)..(1320): n is a, c, g, or t
  misc_feature (1323)..(1324): n is a, c, g, or t
  misc_feature (1326)..(1327): n is a, c, g, or t
  misc_feature (1332)..(1332): n is a, c, g, or t
  misc_feature (1336)..(1336): n is a, c, g, or t
  misc_feature (1340)..(1345): n is a, c, g, or t
tagagaaattactatgagaggatcgcatcaccatcaccatcacggatcctatttaggtgacactatagaatcgtcgacccacgcgtccggttatcatcaacaagaccagcagcaccagaattcagtttgctcccaggaaagcctttttgtggaaaacagtaggctcttggaagacagtaacatatgcaatgagacctataagaaaagacagctctttcggggcaacagagatggctcagggagaacatctgggagtcgacagagcagctcagaaaatgaactcaagtggtctgaccaccaaagggcctggagcagcacagactccgacagttccaaccgcaatctaaagcccgccatgaccaagacggcgagttttgggggcatcacggtgctgaccaggggtgacagcacttccagtactaggagtaccgggaagctgtccaaagcaggttccgagtcttccagcagtgcaggctcctcaggatcgctgtcccgcacccatccacctctccagagcacacccctagtctcaggtgtggcagctggctctccaggctgtgtgccttatccagagaatggaatagggggccaggttgctcccagcagcaccagctacatcctccttccacttgaagctgcaacaggcatcccgcctggaagcatccttcttaatccacacacaggccagccctttgtgaatcccgatggaactcctgcaatatacaacccacccaccagtcagcagcccctgcgaagcgccatggtggggcagtcccaacagcagccaccacagcagcagccctccccgcagccccaacagcaggtccagccaccgcagccacagatggcaggccctctggtcactcagtctgtccaggggctgcaggcttcctcccagtcagtgcaatatccagcagtctcttttcctccccnagcacctcctacctgtgtctccaacgcancacttttcccatganaanatgatgtggcaacccagtttgggcnaaatgaccctgaaccnggcagtccctcggggganaactcctgaacccccatcagggnctggtctacccnatcctccctttggcnaaanccnggnccannancccnanntttngtaatcnccttttaaaggncannannttcctaaggaggatttccaggnttgggccttccattnccananggnccncnaccccctccttnccannggaattttggnaaancnncccctggnnaaaggccggnatttntttnccnnngggnnnancccnncccnnccccaannnannggcccngggccccgntttnnaaannnnnaannannaaaangccngggnnnnnn

SEQ ID NO: 476 - DNA, 1391 bp, Homo Sapiens
  misc_feature (604)..(604): n is a, c, g, or t
  misc_feature (650)..(650): n is a, c, g, or t
  misc_feature (653)..(653): n is a, c, g, or t
  misc_feature (672)..(672): n is a, c, g, or t
  misc_feature (691)..(691): n is a, c, g, or t
  misc_feature (694)..(694): n is a, c, g, or t
  misc_feature (698)..(698): n is a, c, g, or t
  misc_feature (701)..(701): n is a, c, g, or t
  misc_feature (705)..(705): n is a, c, g, or t
  misc_feature (723)..(723): n is a, c, g, or t
  misc_feature (733)..(733): n is a, c, g, or t
  misc_feature (739)..(740): n is a, c, g, or t
  misc_feature (746)..(746): n is a, c, g, or t
  misc_feature (750)..(751): n is a, c, g, or t
  misc_feature (759)..(759): n is a, c, g, or t
  misc_feature (794)..(794): n is a, c, g, or t
  misc_feature (799)..(799): n is a, c, g, or t
  misc_feature (817)..(817): n is a, c, g, or t
  misc_feature (824)..(824): n is a, c, g, or t
  misc_feature (829)..(830): n is a, c, g, or t
  misc_feature (833)..(833): n is a, c, g, or t
  misc_feature (838)..(838): n is a, c, g, or t
  misc_feature (849)..(849): n is a, c, g, or t
  misc_feature (886)..(887): n is a, c, g, or t
  misc_feature (891)..(891): n is a, c, g, or t
  misc_feature (913)..(913): n is a, c, g, or t
  misc_feature (922)..(922): n is a, c, g, or t
  misc_feature (930)..(930): n is a, c, g, or t
  misc_feature (936)..(936): n is a, c, g, or t
  misc_feature (946)..(946): n is a, c, g, or t
  misc_feature (961)..(961): n is a, c, g, or t
  misc_feature (969)..(969): n is a, c, g, or t
  misc_feature (971)..(971): n is a, c, g, or t
  misc_feature (975)..(975): n is a, c, g, or t
  misc_feature (979)..(981): n is a, c, g, or t
  misc_feature (983)..(983): n is a, c, g, or t
  misc_feature (985)..(985): n is a, c, g, or t
  misc_feature (987)..(988): n is a, c, g, or t
  misc_feature (991)..(991): n is a, c, g, or t
  misc_feature (993)..(994): n is a, c, g, or t
  misc_feature (996)..(996): n is a, c, g, or t
  misc_feature (999)..(999): n is a, c, g, or t
  misc_feature (1007)..(1007): n is a, c, g, or t
  misc_feature (1009)..(1014): n is a, c, g, or t
  misc_feature (1019)..(1021): n is a, c, g, or t
  misc_feature (1033)..(1035): n is a, c, g, or t
  misc_feature (1037)..(1037): n is a, c, g, or t
  misc_feature (1039)..(1039): n is a, c, g, or t
  misc_feature (1048)..(1051): n is a, c, g, or t
  misc_feature (1054)..(1055): n is a, c, g, or t
  misc_feature (1058)..(1060): n is a, c, g, or t
  misc_feature (1064)..(1065): n is a, c, g, or t
  misc_feature (1069)..(1069): n is a, c, g, or t
  misc_feature (1072)..(1073): n is a, c, g, or t
  misc_feature (1078)..(1079): n is a, c, g, or t
  misc_feature (1082)..(1082): n is a, c, g, or t
  misc_feature (1088)..(1088): n is a, c, g, or t
  misc_feature (1090)..(1091): n is a, c, g, or t
  misc_feature (1101)..(1105): n is a, c, g, or t
  misc_feature (1107)..(1109): n is a, c, g, or t
  misc_feature (1112)..(1112): n is a, c, g, or t
  misc_feature (1116)..(1116): n is a, c, g, or t
  misc_feature (1119)..(1119): n is a, c, g, or t
  misc_feature (1122)..(1122): n is a, c, g, or t
  misc_feature (1125)..(1126): n is a, c, g, or t
  misc_feature (1134)..(1134): n is a, c, g, or t
  misc_feature (1136)..(1136): n is a, c, g, or t
  misc_feature (1138)..(1141): n is a, c, g, or t
  misc_feature (1146)..(1146): n is a, c, g, or t
  misc_feature (1155)..(1155): n is a, c, g, or t
  misc_feature (1157)..(1157): n is a, c, g, or t
  misc_feature (1164)..(1164): n is a, c, g, or t
  misc_feature (1168)..(1170): n is a, c, g, or t
  misc_feature (1173)..(1173): n is a, c, g, or t
  misc_feature (1176)..(1176): n is a, c, g, or t
  misc_feature (1178)..(1179): n is a, c, g, or t
  misc_feature (1182)..(1182): n is a, c, g, or t
  misc_feature (1187)..(1189): n is a, c, g, or t
  misc_feature (1191)..(1192): n is a, c, g, or t
  misc_feature (1198)..(1198): n is a, c, g, or t
  misc_feature (1203)..(1203): n is a, c, g, or t
  misc_feature (1205)..(1205): n is a, c, g, or t
  misc_feature (1208)..(1208): n is a, c, g, or t
  misc_feature (1211)..(1211): n is a, c, g, or t
  misc_feature (1215)..(1217): n is a, c, g, or t
  misc_feature (1219)..(1220): n is a, c, g, or t
  misc_feature (1223)..(1225): n is a, c, g, or t
  misc_feature (1229)..(1229): n is a, c, g, or t
  misc_feature (1231)..(1231): n is a, c, g, or t
  misc_feature (1234)..(1235): n is a, c, g, or t
  misc_feature (1241)..(1241): n is a, c, g, or t
  misc_feature (1243)..(1244): n is a, c, g, or t
  misc_feature (1247)..(1248): n is a, c, g, or t
  misc_feature (1250)..(1251): n is a, c, g, or t
  misc_feature (1255)..(1256): n is a, c, g, or t
  misc_feature (1259)..(1261): n is a, c, g, or t
  misc_feature (1267)..(1267): n is a, c, g, or t
  misc_feature (1270)..(1271): n is a, c, g, or t
  misc_feature (1275)..(1275): n is a, c, g, or t
  misc_feature (1280)..(1280): n is a, c, g, or t
  misc_feature (1282)..(1282): n is a, c, g, or t
  misc_feature (1287)..(1290): n is a, c, g, or t
  misc_feature (1292)..(1292): n is a, c, g, or t
  misc_feature (1295)..(1295): n is a, c, g, or t
  misc_feature (1297)..(1297): n is a, c, g, or t
  misc_feature (1299)..(1300): n is a, c, g, or t
  misc_feature (1302)..(1302): n is a, c, g, or t
  misc_feature (1304)..(1305): n is a, c, g, or t
  misc_feature (1308)..(1310): n is a, c, g, or t
  misc_feature (1312)..(1317): n is a, c, g, or t
  misc_feature (1320)..(1321): n is a, c, g, or t
  misc_feature (1326)..(1326): n is a, c, g, or t
  misc_feature (1328)..(1329): n is a, c, g, or t
  misc_feature (1332)..(1332): n is a, c, g, or t
  misc_feature (1335)..(1335): n is a, c, g, or t
  misc_feature (1337)..(1337): n is a, c, g, or t
  misc_feature (1339)..(1342): n is a, c, g, or t
  misc_feature (1345)..(1345): n is a, c, g, or t
  misc_feature (1347)..(1349): n is a, c, g, or t
  misc_feature (1351)..(1353): n is a, c, g, or t
  misc_feature (1355)..(1355): n is a, c, g, or t
  misc_feature (1357)..(1361): n is a, c, g, or t
  misc_feature (1364)..(1364): n is a, c, g, or t
  misc_feature (1366)..(1368): n is a, c, g, or t
  misc_feature (1371)..(1375): n is a, c, g, or t
  misc_feature (1377)..(1382): n is a, c, g, or t
  misc_feature (1385)..(1385): n is a, c, g, or t
  misc_feature (1388)..(1388): n is a, c, g, or t
tagagaaattactatgagaggatcgcatcaccatcaccatcacggatcctatttaggtgacactatagaatcgtcgacccacgcgtccgcgggcggcggcggagcgggcggcggagcggcggcagcagcggtgagcgcgagccccggagccccgggcggccggcctcccgcgcccgcgcagccccgcgtctgcgtccggccggagacgccgggccccgcgccgcgccgcgccatgtcggtgaacatggacgagctgcggcaccaggtcatgatcaaccagttcgtgctggccgcgggctgcgcggccgaccaggcgaagcagttgctgcaggcggcccactggcagttcgagaccgcgctgagcacgttcttccaagaaaccaacattcccaacagccaccaccaccaccagatgatgtgcactcccagcaacacccctgccacgccgcccaacttccccgatgcgctggccatgttctccaagctccgcgcctccgagggcctgcagagcagcaacagccccatgacagccgcagcctgctccccacctgcaaacttcagccccttctgggcctcgtccccgcccagccaccaggcgccctgnatcccgccctcctcccccaccaccttccaccacctccaccgcccanagnccaagtggcccccaggatnacagcatgggggcgcccancanaaanccntggnggccatggacggccaaanattaaactgnacgccnnctggcnctgnntggaaatngggtgcacccctaggtttgtggggaacacagtaanggtcnatgggaggggggaacccngggaagngctannggnttttnccaaaaatccnctggaaaaaattttttaaaaaaaatttttgtggggtnngggnaaaaaaaaaaattttccttganccaattggnttcttttnaaaaanttttttaggnaaatttttttccttntttttttnanattntaannnanananntantnnanttnataaaatntnnnnnnatttnnnttaaaaaatggnnntnanaaaacttannnntannttnnntaannttancanntttannaantttaananntatttttttnnnnnannngtntttnttnatnttnntttttttnanannnnaattntttttaatntntaaaaanaaannnttnttntnnttntttannnanntaaaanttttntnttntantatnnntnnaannntatntnaanntttttntnnaannanntttnntannnttattntannttanattantntattnnnnanttntntnntnanntannntnnnnnntannatttnannaanaantntnnnntantnnntnnntntnnnnntanannnaannnnntnnnnnntantantaa

SEQ ID NO: 477 - DNA, 1159 bp, Homo Sapiens
cttattaagagggagaattaactatgagaggatcgcatcaccatcaccatcacggatcctatttaggtgacactaaagaatcgtcgacccacgcgtccgaaatcatgacccgagaggtgcagacaaatgacttgaaagaagtggtcaataaattgattccagacagcattggaaaagacatagaaaaggcttgccaatctatttatcctctccatgatgtcttcgttagaaaagtaaaaatgctgaagaagcccaagtttgaattgggaaagctcatggagcttcatggtgaaggcagtagttctggaaaagccactggggacgagacaggtgctaaagttgaacgagctgatggatatgaaccaccagtccaagaatctgtttaaagttcagacttcaaatagtggcaaataaaaagtgctatttgtgaaaaaaaaaaaaaaaaaaaaaaaaaaaaaaaaaaaaaaaaaaaaaaaaaaaaaggggggccgccccccaaaggggggcctattaagcttaattaactgaacttggacccctggtgaaaaatcccataaagacccccaaactccctctggatttgttccaaaagctcggttgcccccgggggttttttattggggaaaaaccaaactaacttggggaaattttccggaactaaggaaactaaaatggaaaaaaaaatcacttgaaatacccccggtgatatatcccaatgggatcctaaaaaaaattttggaggatttccgtccgttggttcatggacccataaccaaaacgttccactggaaattacggcctttttaaaaaacgtaaagaaaaataaacaaaagtttaaccgggcctttattccctttttgcccccctgaagaatgctccatccgaatttctatggcaatgaaaaaaggggaactggtgatatgggatagggtcaaccttggtaaaccgttttcatgagcaacttgaaacgtttttatcgtctggaagtgaataccacgacaattttccggcagtttctacacatatatcgcaagatgtggcgtgttacgtgaaacctggcctaatttccctaaaggttatggagatatggttttcgtccagcaatccctgggggagtttacacagtttttgatttaaagggggccatatggacaccctc

SEQ ID NO: 478 - DNA, 1361 bp, Homo Sapiens; identical to SEQ ID NO: 141
  misc_feature (836)..(836): n is a, c, g, or t
  misc_feature (855)..(855): n is a, c, g, or t
  misc_feature (857)..(857): n is a, c, g, or t
  misc_feature (872)..(872): n is a, c, g, or t
  misc_feature (891)..(891): n is a, c, g, or t
  misc_feature (909)..(909): n is a, c, g, or t
  misc_feature (914)..(914): n is a, c, g, or t
  misc_feature (929)..(929): n is a, c, g, or t
  misc_feature (933)..(933): n is a, c, g, or t
  misc_feature (938)..(938): n is a, c, g, or t
  misc_feature (945)..(945): n is a, c, g, or t
  misc_feature (961)..(961): n is a, c, g, or t
  misc_feature (968)..(968): n is a, c, g, or t
  misc_feature (972)..(972): n is a, c, g, or t
  misc_feature (980)..(980): n is a, c, g, or t
  misc_feature (996)..(996): n is a, c, g, or t
  misc_feature (1017)..(1017): n is a, c, g, or t
  misc_feature (1028)..(1028): n is a, c, g, or t
  misc_feature (1033)..(1033): n is a, c, g, or t
  misc_feature (1047)..(1047): n is a, c, g, or t
  misc_feature (1063)..(1063): n is a, c, g, or t
  misc_feature (1077)..(1077): n is a, c, g, or t
  misc_feature (1088)..(1088): n is a, c, g, or t
  misc_feature (1096)..(1096): n is a, c, g, or t
  misc_feature (1120)..(1120): n is a, c, g, or t
  misc_feature (1124)..(1124): n is a, c, g, or t
  misc_feature (1126)..(1126): n is a, c, g, or t
  misc_feature (1131)..(1131): n is a, c, g, or t
  misc_feature (1134)..(1134): n is a, c, g, or t
  misc_feature (1139)..(1139): n is a, c, g, or t
  misc_feature (1143)..(1143): n is a, c, g, or t
  misc_feature (1151)..(1151): n is a, c, g, or t
  misc_feature (1166)..(1166): n is a, c, g, or t
  misc_feature (1168)..(1168): n is a, c, g, or t
  misc_feature (1172)..(1172): n is a, c, g, or t
  misc_feature (1181)..(1181): n is a, c, g, or t
  misc_feature (1183)..(1184): n is a, c, g, or t
  misc_feature (1189)..(1190): n is a, c, g, or t
  misc_feature (1201)..(1201): n is a, c, g, or t
  misc_feature (1214)..(1214): n is a, c, g, or t
  misc_feature (1232)..(1232): n is a, c, g, or t
  misc_feature (1244)..(1244): n is a, c, g, or t
  misc_feature (1247)..(1247): n is a, c, g, or t
  misc_feature (1256)..(1256): n is a, c, g, or t
  misc_feature (1263)..(1263): n is a, c, g, or t
  misc_feature (1275)..(1275): n is a, c, g, or t
  misc_feature (1280)..(1280): n is a, c, g, or t
  misc_feature (1283)..(1283): n is a, c, g, or t
  misc_feature (1287)..(1287): n is a, c, g, or t
  misc_feature (1291)..(1291): n is a, c, g, or t
  misc_feature (1298)..(1298): n is a, c, g, or t
  misc_feature (1300)..(1304): n is a, c, g, or t
  misc_feature (1307)..(1307): n is a, c, g, or t
  misc_feature (1310)..(1313): n is a, c, g, or t
  misc_feature (1316)..(1316): n is a, c, g, or t
  misc_feature (1319)..(1319): n is a, c, g, or t
  misc_feature (1321)..(1322): n is a, c, g, or t
  misc_feature (1324)..(1325): n is a, c, g, or t
  misc_feature (1327)..(1327): n is a, c, g, or t
  misc_feature (1332)..(1332): n is a, c, g, or t
  misc_feature (1335)..(1337): n is a, c, g, or t
  misc_feature (1341)..(1341): n is a, c, g, or t
  misc_feature (1344)..(1344): n is a, c, g, or t
  misc_feature (1351)..(1355): n is a, c, g, or t
  misc_feature (1358)..(1358): n is a, c, g, or t

SEQ ID NO: 479 - DNA, 1200 bp, Homo Sapiens; identical to SEQ ID NO: 306
  misc_feature (765)..(765): n is a, c, g, or t
  misc_feature (909)..(909): n is a, c, g, or t
  misc_feature (912)..(912): n is a, c, g, or t
  misc_feature (926)..(926): n is a, c, g, or t
  misc_feature (941)..(941): n is a, c, g, or t
  misc_feature (967)..(967): n is a, c, g, or t
  misc_feature (977)..(977): n is a, c, g, or t
  misc_feature (986)..(986): n is a, c, g, or t
  misc_feature (988)..(988): n is a, c, g, or t
  misc_feature (1013)..(1013): n is a, c, g, or t
  misc_feature (1051)..(1051): n is a, c, g, or t
  misc_feature (1060)..(1060): n is a, c, g, or t
  misc_feature (1063)..(1063): n is a, c, g, or t
  misc_feature (1082)..(1082): n is a, c, g, or t
  misc_feature (1088)..(1088): n is a, c, g, or t
  misc_feature (1095)..(1095): n is a, c, g, or t
  misc_feature (1100)..(1100): n is a, c, g, or t
  misc_feature (1102)..(1102): n is a, c, g, or t
  misc_feature (1115)..(1115): n is a, c, g, or t
  misc_feature (1117)..(1117): n is a, c, g, or t
  misc_feature (1122)..(1122): n is a, c, g, or t
  misc_feature (1128)..(1128): n is a, c, g, or t
  misc_feature (1132)..(1132): n is a, c, g, or t
  misc_feature (1134)..(1134): n is a, c, g, or t
  misc_feature (1137)..(1138): n is a, c, g, or t
  misc_feature (1140)..(1142): n is a, c, g, or t
  misc_feature (1144)..(1144): n is a, c, g, or t
  misc_feature (1149)..(1149): n is a, c, g, or t
  misc_feature (1172)..(1172): n is a, c, g, or t
  misc_feature (1177)..(1178): n is a, c, g, or t
  misc_feature (1181)..(1183): n is a, c, g, or t
  misc_feature (1185)..(1187): n is a, c, g, or t
  misc_feature (1190)..(1190): n is a, c, g, or t
  misc_feature (1192)..(1192): n is a, c, g, or t
  misc_feature (1200)..(1200): n is a, c, g, or t

SEQ ID NO: 480 - DNA, 1342 bp, Homo Sapiens
  misc_feature (870)..(870): n is a, c, g, or t
  misc_feature (974)..(974): n is a, c, g, or t
  misc_feature (980)..(980): n is a, c, g, or t
  misc_feature (984)..(984): n is a, c, g, or t
  misc_feature (989)..(989): n is a, c, g, or t
  misc_feature (997)..(997): n is a, c, g, or t
  misc_feature (1003)..(1003): n is a, c, g, or t
  misc_feature (1009)..(1009): n is a, c, g, or t
  misc_feature (1011)..(1011): n is a, c, g, or t
  misc_feature (1024)..(1024): n is a, c, g, or t
  misc_feature (1027)..(1027): n is a, c, g, or t
  misc_feature (1030)..(1030): n is a, c, g, or t
  misc_feature (1042)..(1042): n is a, c, g, or t
  misc_feature (1050)..(1050): n is a, c, g, or t
  misc_feature (1053)..(1054): n is a, c, g, or t
  misc_feature (1067)..(1067): n is a, c, g, or t
  misc_feature (1075)..(1075): n is a, c, g, or t
  misc_feature (1082)..(1082): n is a, c, g, or t
  misc_feature (1087)..(1087): n is a, c, g, or t
  misc_feature (1091)..(1091): n is a, c, g, or t
  misc_feature (1094)..(1094): n is a, c, g, or t
  misc_feature (1096)..(1096): n is a, c, g, or t
  misc_feature (1100)..(1100): n is a, c, g, or t
  misc_feature (1109)..(1109): n is a, c, g, or t
  misc_feature (1122)..(1122): n is a, c, g, or t
  misc_feature (1125)..(1125): n is a, c, g, or t
  misc_feature (1130)..(1130): n is a, c, g, or t
  misc_feature (1135)..(1135): n is a, c, g, or t
  misc_feature (1138)..(1139): n is a, c, g, or t
  misc_feature (1152)..(1152): n is a, c, g, or t
  misc_feature (1156)..(1156): n is a, c, g, or t
  misc_feature (1173)..(1173): n is a, c, g, or t
  misc_feature (1187)..(1187): n is a, c, g, or t
  misc_feature (1191)..(1192): n is a, c, g, or t
  misc_feature (1197)..(1198): n is a, c, g, or t
  misc_feature (1201)..(1203): n is a, c, g, or t
  misc_feature (1207)..(1208): n is a, c, g, or t
  misc_feature (1210)..(1210): n is a, c, g, or t
  misc_feature (1212)..(1212): n is a, c, g, or t
  misc_feature (1214)..(1215): n is a, c, g, or t
  misc_feature (1217)..(1217): n is a, c, g, or t
  misc_feature (1223)..(1223): n is a, c, g, or t
  misc_feature (1229)..(1229): n is a, c, g, or t
  misc_feature (1237)..(1237): n is a, c, g, or t
  misc_feature (1240)..(1240): n is a, c, g, or t
  misc_feature (1247)..(1247): n is a, c, g, or t
  misc_feature (1249)..(1249): n is a, c, g, or t
  misc_feature (1252)..(1254): n is a, c, g, or t
  misc_feature (1256)..(1258): n is a, c, g, or t
  misc_feature (1283)..(1283): n is a, c, g, or t
  misc_feature (1286)..(1290): n is a, c, g, or t
  misc_feature (1293)..(1295): n is a, c, g, or t
  misc_feature (1302)..(1308): n is a, c, g, or t
  misc_feature (1311)..(1311): n is a, c, g, or t
  misc_feature (1319)..(1319): n is a, c, g, or t
  misc_feature (1321)..(1322): n is a, c, g, or t
  misc_feature (1327)..(1328): n is a, c, g, or t
  misc_feature (1331)..(1333): n is a, c, g, or t
  misc_feature (1336)..(1336): n is a, c, g, or t
  misc_feature (1338)..(1338): n is a, c, g, or t
gagaaattactatgagaggatcgcatcaccatcaccatcacggatcctatttaggtgacactatagaatcgtcgacccacgcgtccgccagaatgcttcagaagaatggattacctttactgagcaaagtcaactagaggcggacaaggctatagaagttttgctcacagcacctacagggaaagcagctggcttactaagacagaaaactggtcttcatgcctacacactgtgtcaggtcaattatagcttctattcatggactcaaacaatgatgaccacaaacaaaccatggaaattttcttcggttagagttctggttgtggatgaagggagtttggtatctgtaggaatcttcaaatcggtcttaaatttattgtgtgagcactccaaactttctaagcttattatccttggtgacattagacagttacccagtattgaacctggtaacttgctgaaagatctttttgagactcttaagtcaagaaattgtgctattgagctaaagacaaaccatagagcagaatctcagctcattgtggacaatgctacaagaatctcaagacgccaatttccaaaatttgatgcagaactaaatatctctgataatccaacattacccatctcaattcaagataagacatttatttttgtcaggctcccagaagaggatgccagttctcagtcatctaaaactaatcatcactcttgtttatattctgcagttaaaactttactacaagaaaataacttacaaaatgcaaaaacatcacaatttattgcatttagaaggcaagactgtgatctaattaatgactgctgctgcaaacactacacaggccacctcaccaaagaccatcagagtanacttgtttttggaattggggataaaatttgttgtaccaggaatgcatacctctcaaacttactacctgaaaatatctctggaagtcagcaaaataatgatctanatgccngtantgaanacttttcngggacncttccngnattttgctaaaanaancgngactttgaaagnaacgttcnacnngcaatggaaaaanattttccnaacaaangaggnaccngangnaacntttggaaanaaaaaatccttgnacnttaanaaaanggnnggggccgggaaanaacngggggaatttaaaaaancaaaggaaaattgncccnnaaaannggnnngggnnanancnntncccccnttttcnggggcccnaanaacaaananttnnntnnngggggggaaggggggcccccccccnggnnnnngtnnnccccccnnnnnnnggncccccccnanngtttnnttnnnagnancccc

SEQ ID NO: 481 - DNA, 1173 bp, Homo Sapiens
ttcctttaagaggagaaattaactatgagaggtcgcatcaccatcaccatcacggatcctatttaggtgacactatagaatcgtcgacccacgcgtccgagaccggccgggaagacattgccaatctagctgatgaattcaaggatcacttggtgcctgaccctggctgccattatgaccaactaattgaaattaacctcagtgagctgaagccacacatcaatgggcccttcacccctgacctggctcaccctgtggcagaagtgggcaaggtggcagagaaggaaggatggcctctggacatccgagtgggtctaattggtagctgcaccaattcaagctatgaagatatggggcgctcagcagctgtggccaagcaggcactggcccatggcctcaagtgcaagtcccagttcaccatcactccaggttccgagcagatccgcgccaccattgagcgggacggctatgcacagatcttgagggatctgggtggcattgtcctggccaatgcttgtggcccctgcattggccagtgggacaggaaggacatcaagaagggggagaagaacacaatcgtcacctcctacaacaggaacttcacgggccgcaacgacgcaaaccccgagacccatgcctttgtcacgtccccagagattgtcacagccctggccattgcgggaaccctcaagttcaacccagagaccgactacctgacgggcacggatggcaagaagttcaggctggaggctccggatgcagatgagcttcccaaaggagagtttgacccagggcaggacacctaccagcacccacccaaggacagcagcgggcagcatgtggacgtgagccccaccagccagcgcctgcagctcctggagccttttgaaagtgggatggcaaggacctggaggacctgcatatcctcatcaaggtcaaagggaagtgtaccactgacacatctcagctgctgaccctggctcaagttccgtgggcacttggatacatcttcaacaacctgctcattggtgcatcacattgaaacggcaggcaactcgtgcgcaatgcgtcactcagattcgaccgtcctgacctgaccgctactacagaacatgcatcaggtggtggtgatcggaatagagaactacggtatgctcggcggaacatgcagcc

SEQ ID NO: 482 - DNA, 1441 bp, Homo Sapiens; identical to SEQ ID NO: 31
  misc_feature (823)..(823): n is a, c, g, or t
  misc_feature (861)..(861): n is a, c, g, or t
  misc_feature (893)..(893): n is a, c, g, or t
  misc_feature (939)..(939): n is a, c, g, or t
  misc_feature (945)..(945): n is a, c, g, or t
  misc_feature (947)..(947): n is a, c, g, or t
  misc_feature (949)..(949): n is a, c, g, or t
  misc_feature (966)..(966): n is a, c, g, or t
  misc_feature (973)..(973): n is a, c, g, or t
  misc_feature (979)..(979): n is a, c, g, or t
  misc_feature (983)..(984): n is a, c, g, or t
  misc_feature (991)..(991): n is a, c, g, or t
  misc_feature (1002)..(1002): n is a, c, g, or t
  misc_feature (1027)..(1028): n is a, c, g, or t
  misc_feature (1031)..(1031): n is a, c, g, or t
  misc_feature (1051)..(1051): n is a, c, g, or t
  misc_feature (1057)..(1057): n is a, c, g, or t
  misc_feature (1066)..(1066): n is a, c, g, or t
  misc_feature (1072)..(1072): n is a, c, g, or t
  misc_feature (1076)..(1076): n is a, c, g, or t
  misc_feature (1087)..(1087): n is a, c, g, or t
  misc_feature (1090)..(1090): n is a, c, g, or t
  misc_feature (1094)..(1094): n is a, c, g, or t
  misc_feature (1101)..(1101): n is a, c, g, or t
  misc_feature (1106)..(1106): n is a, c, g, or t
  misc_feature (1109)..(1109): n is a, c, g, or t
  misc_feature (1123)..(1123): n is a, c, g, or t
  misc_feature (1125)..(1126): n is a, c, g, or t
  misc_feature (1128)..(1128): n is a, c, g, or t
  misc_feature (1133)..(1133): n is a, c, g, or t
  misc_feature (1138)..(1138): n is a, c, g, or t
  misc_feature (1140)..(1141): n is a, c, g, or t
  misc_feature (1147)..(1147): n is a, c, g, or t
  misc_feature (1156)..(1156): n is a, c, g, or t
  misc_feature (1158)..(1158): n is a, c, g, or t
  misc_feature (1161)..(1161): n is a, c, g, or t
  misc_feature (1184)..(1184): n is a, c, g, or t
  misc_feature (1188)..(1188): n is a, c, g, or t
  misc_feature (1194)..(1194): n is a, c, g, or t
  misc_feature (1202)..(1202): n is a, c, g, or t
  misc_feature (1204)..(1204): n is a, c, g, or t
  misc_feature (1214)..(1214): n is a, c, g, or t
  misc_feature (1225)..(1226): n is a, c, g, or t
  misc_feature (1249)..(1249): n is a, c, g, or t
  misc_feature (1256)..(1256): n is a, c, g, or t
  misc_feature (1279)..(1280): n is a, c, g, or t
  misc_feature (1282)..(1282): n is a, c, g, or t
  misc_feature (1287)..(1287): n is a, c, g, or t
  misc_feature (1292)..(1294): n is a, c, g, or t
  misc_feature (1304)..(1304): n is a, c, g, or t
  misc_feature (1315)..(1316): n is a, c, g, or t
  misc_feature (1319)..(1320): n is a, c, g, or t
  misc_feature (1328)..(1330): n is a, c, g, or t
  misc_feature (1332)..(1332): n is a, c, g, or t
  misc_feature (1340)..(1340): n is a, c, g, or t
  misc_feature (1344)..(1344): n is a, c, g, or t
  misc_feature (1346)..(1347): n is a, c, g, or t
  misc_feature (1349)..(1350): n is a, c, g, or t
  misc_feature (1367)..(1367): n is a, c, g, or t
  misc_feature (1369)..(1369): n is a, c, g, or t
  misc_feature (1371)..(1371): n is a, c, g, or t
  misc_feature (1373)..(1373): n is a, c, g, or t
  misc_feature (1379)..(1379): n is a, c, g, or t
  misc_feature (1383)..(1383): n is a, c, g, or t
  misc_feature (1388)..(1388): n is a, c, g, or t
  misc_feature (1402)..(1403): n is a, c, g, or t
  misc_feature (1413)..(1413): n is a, c, g, or t
  misc_feature (1416)..(1416): n is a, c, g, or t
  misc_feature (1431)..(1431): n is a, c, g, or t
  misc_feature (1441)..(1441): n is a, c, g, or t

SEQ ID NO: 483 - DNA, 1200 bp, Homo Sapiens; identical to SEQ ID NO: 14
  misc_feature (710)..(710): n is a, c, g, or t
  misc_feature (767)..(767): n is a, c, g, or t
  misc_feature (929)..(929): n is a, c, g, or t
  misc_feature (978)..(979): n is a, c, g, or t
  misc_feature (1000)..(1000): n is a, c, g, or t
  misc_feature (1027)..(1028): n is a, c, g, or t
  misc_feature (1034)..(1034): n is a, c, g, or t
  misc_feature (1041)..(1041): n is a, c, g, or t
  misc_feature (1044)..(1044): n is a, c, g, or t
  misc_feature (1065)..(1067): n is a, c, g, or t
  misc_feature (1091)..(1091): n is a, c, g, or t
  misc_feature (1110)..(1110): n is a, c, g, or t
  misc_feature (1115)..(1115): n is a, c, g, or t
  misc_feature (1122)..(1122): n is a, c, g, or t
  misc_feature (1124)..(1124): n is a, c, g, or t
  misc_feature (1129)..(1129): n is a, c, g, or t
  misc_feature (1134)..(1134): n is a, c, g, or t
  misc_feature (1147)..(1147): n is a, c, g, or t
  misc_feature (1152)..(1152): n is a, c, g, or t
  misc_feature (1163)..(1163): n is a, c, g, or t
  misc_feature (1174)..(1174): n is a, c, g, or t
  misc_feature (1186)..(1186): n is a, c, g, or t
  misc_feature (1193)..(1193): n is a, c, g, or t
  misc_feature (1199)..(1199): n is a, c, g, or t

SEQ ID NO: 484 - DNA, 1195 bp, Homo Sapiens
ttccttttagaaggagaattactatgagaggtcgcatcaccatcaccatcacggatcctatttaggtgacactaaagaatcgtcgacccacgcgtccggcctcgagttgggaaaaaaacaaggcagtagtaaggaggaacaggaaaggaagaggctgatccacaaacacaagcgtgaatttaaaggggccgttcgagaaatccgcaaggacaatcagttcctggcgaggatgcaactctcagaaatcatggaacgggatgcggaaagaaagcggaaagtaaagcagctttttaacagcctggctacacaggaaggcgaatggaaggctctgaagaggaaaaagttcaaaaaataaattacattttataaataaggcaaggaactggacattacctcacatctgcaattccaaccctctgggaggccaaggcaggaggattgcttcagcccgggagttcgagaccagcctgggcaacacaggaagaccccgtctctaccagaaaaagttaaaaattacccaaatggggtggcacctgcctgggggcccaattactcggtacgctgaatgggtaggactgcttgacctgactccaaggttacatgctagccgtgattgacccactgcactccagccctcgatgaccctgcataatcgggtcttctacgaaatagtttttatttttgaagacctgtctttgctgctgttggcgggctgtaactgcaatggttgtccctgacatgctggcgctggagtctttctctggtgacacgctcaagatcctgttgcattacaaacccgtgacacccggcaccgccactttgctagtttttcaacagacccgtgatctcggtaaatcaatctctggtcctgaattaacctaactcagtatccacctgggcgtgctcctgaattacatgttctttcccgggccccgctaaaaatcagttttcgtagcggaatacagcccatttcgtgggggggatcccgaaatcctacttccccgatgtgctgaatgattcttgtttgagcttcacagtcatctgaggagtatgactagcgcggacctgcctcactatcatgggcggagggtctggtttctccggcatctccggggtccattcctgctggcactggcccatgacgcgcaaagggggatctcgttccggaacatctgcgggaggtgtggggcgagag

SEQ ID NO: 485 - DNA, 1200 bp, Homo Sapiens; identical to SEQ ID NO: 285
  misc_feature (906)..(906): n is a, c, g, or t
  misc_feature (941)..(941): n is a, c, g, or t
  misc_feature (952)..(952): n is a, c, g, or t
  misc_feature (976)..(976): n is a, c, g, or t
  misc_feature (984)..(984): n is a, c, g, or t
  misc_feature (993)..(993): n is a, c, g, or t
  misc_feature (1004)..(1004): n is a, c, g, or t
  misc_feature (1011)..(1011): n is a, c, g, or t
  misc_feature (1014)..(1014): n is a, c, g, or t
  misc_feature (1024)..(1025): n is a, c, g, or t
  misc_feature (1033)..(1033): n is a, c, g, or t
  misc_feature (1037)..(1038): n is a, c, g, or t
  misc_feature (1047)..(1047): n is a, c, g, or t
  misc_feature (1049)..(1049): n is a, c, g, or t
  misc_feature (1055)..(1055): n is a, c, g, or t
  misc_feature (1062)..(1062): n is a, c, g, or t
  misc_feature (1066)..(1066): n is a, c, g, or t
  misc_feature (1068)..(1068): n is a, c, g, or t
  misc_feature (1075)..(1075): n is a, c, g, or t
  misc_feature (1082)..(1082): n is a, c, g, or t
  misc_feature (1087)..(1087): n is a, c, g, or t
  misc_feature (1090)..(1090): n is a, c, g, or t
  misc_feature (1095)..(1095): n is a, c, g, or t
  misc_feature (1127)..(1127): n is a, c, g, or t
  misc_feature (1132)..(1132): n is a, c, g, or t
  misc_feature (1134)..(1134): n is a, c, g, or t
  misc_feature (1137)..(1137): n is a, c, g, or t
  misc_feature (1160)..(1160): n is a, c, g, or t
  misc_feature (1169)..(1169): n is a, c, g, or t
  misc_feature (1199)..(1200): n is a, c, g, or t

SEQ ID NO: 486 - DNA, 1200 bp, Homo Sapiens; identical to SEQ ID NO: 290
  misc_feature (819)..(819): n is a, c, g, or t
  misc_feature (870)..(870): n is a, c, g, or t
  misc_feature (872)..(872): n is a, c, g, or t
  misc_feature (910)..(910): n is a, c, g, or t
  misc_feature (913)..(914): n is a, c, g, or t
  misc_feature (929)..(929): n is a, c, g, or t
  misc_feature (953)..(953): n is a, c, g, or t
  misc_feature (959)..(960): n is a, c, g, or t
  misc_feature (962)..(962): n is a, c, g, or t
  misc_feature (972)..(972): n is a, c, g, or t
  misc_feature (979)..(979): n is a, c, g, or t
  misc_feature (983)..(983): n is a, c, g, or t
  misc_feature (995)..(995): n is a, c, g, or t
  misc_feature (1004)..(1005): n is a, c, g, or t
  misc_feature (1010)..(1010): n is a, c, g, or t
  misc_feature (1018)..(1018): n is a, c, g, or t
  misc_feature (1025)..(1025): n is a, c, g, or t
  misc_feature (1038)..(1038): n is a, c, g, or t
  misc_feature (1047)..(1047): n is a, c, g, or t
  misc_feature (1060)..(1060): n is a, c, g, or t
  misc_feature (1075)..(1075): n is a, c, g, or t
  misc_feature (1080)..(1082): n is a, c, g, or t
  misc_feature (1088)..(1089): n is a, c, g, or t
  misc_feature (1101)..(1101): n is a, c, g, or t
  misc_feature (1112)..(1112): n is a, c, g, or t
  misc_feature (1117)..(1117): n is a, c, g, or t
  misc_feature (1127)..(1127): n is a, c, g, or t
  misc_feature (1137)..(1137): n is a, c, g, or t
  misc_feature (1139)..(1139): n is a, c, g, or t
  misc_feature (1141)..(1141): n is a, c, g, or t
  misc_feature (1148)..(1148): n is a, c, g, or t
  misc_feature (1152)..(1152): n is a, c, g, or t
  misc_feature (1156)..(1156): n is a, c, g, or t
  misc_feature (1159)..(1159): n is a, c, g, or t
  misc_feature (1166)..(1166): n is a, c, g, or t
  misc_feature (1169)..(1169): n is a, c, g, or t
  misc_feature (1173)..(1173): n is a, c, g, or t
  misc_feature (1176)..(1176): n is a, c, g, or t
  misc_feature (1185)..(1185): n is a, c, g, or t
  misc_feature (1190)..(1191): n is a, c, g, or t
  misc_feature (1198)..(1199): n is a, c, g, or t

SEQ ID NO: 487 - DNA, 1365 bp, Homo Sapiens
  misc_feature (1)..(1): n is a, c, g, or t
  misc_feature (815)..(815): n is a, c, g, or t
  misc_feature (882)..(882): n is a, c, g, or t
  misc_feature (938)..(938): n is a, c, g, or t
  misc_feature (962)..(962): n is a, c, g, or t
  misc_feature (964)..(964): n is a, c, g, or t
  misc_feature (978)..(978): n is a, c, g, or t
  misc_feature (988)..(988): n is a, c, g, or t
  misc_feature (1008)..(1008): n is a, c, g, or t
  misc_feature (1057)..(1058): n is a, c, g, or t
  misc_feature (1061)..(1061): n is a, c, g, or t
  misc_feature (1064)..(1064): n is a, c, g, or t
  misc_feature (1073)..(1073): n is a, c, g, or t
  misc_feature (1086)..(1086): n is a, c, g, or t
  misc_feature (1088)..(1088): n is a, c, g, or t
  misc_feature (1094)..(1094): n is a, c, g, or t
  misc_feature (1105)..(1105): n is a, c, g, or t
  misc_feature (1109)..(1109): n is a, c, g, or t
  misc_feature (1114)..(1114): n is a, c, g, or t
  misc_feature (1117)..(1117): n is a, c, g, or t
  misc_feature (1120)..(1120): n is a, c, g, or t
  misc_feature (1122)..(1122): n is a, c, g, or t
  misc_feature (1129)..(1129): n is a, c, g, or t
  misc_feature (1140)..(1140): n is a, c, g, or t
  misc_feature (1150)..(1150): n is a, c, g, or t
  misc_feature (1156)..(1156): n is a, c, g, or t
  misc_feature (1162)..(1162): n is a, c, g, or t
  misc_feature (1165)..(1165): n is a, c, g, or t
  misc_feature (1175)..(1175): n is a, c, g, or t
  misc_feature (1180)..(1180): n is a, c, g, or t
  misc_feature (1191)..(1191): n is a, c, g, or t
  misc_feature (1198)..(1198): n is a, c, g, or t
  misc_feature (1203)..(1203): n is a, c, g, or t
  misc_feature (1214)..(1214): n is a, c, g, or t
  misc_feature (1222)..(1222): n is a, c, g, or t
  misc_feature (1231)..(1231): n is a, c, g, or t
  misc_feature (1236)..(1237): n is a, c, g, or t
  misc_feature (1249)..(1249): n is a, c, g, or t
  misc_feature (1256)..(1256): n is a, c, g, or t
  misc_feature (1259)..(1259): n is a, c, g, or t
  misc_feature (1270)..(1270): n is a, c, g, or t
  misc_feature (1276)..(1276): n is a, c, g, or t
  misc_feature (1284)..(1285): n is a, c, g, or t
  misc_feature (1289)..(1289): n is a, c, g, or t
  misc_feature (1292)..(1292): n is a, c, g, or t
  misc_feature (1294)..(1294): n is a, c, g, or t
  misc_feature (1297)..(1297): n is a, c, g, or t
  misc_feature (1299)..(1299): n is a, c, g, or t
  misc_feature (1306)..(1306): n is a, c, g, or t
  misc_feature (1308)..(1308): n is a, c, g, or t
  misc_feature (1310)..(1311): n is a, c, g, or t
  misc_feature (1313)..(1313): n is a, c, g, or t
  misc_feature (1323)..(1323): n is a, c, g, or t
  misc_feature (1326)..(1329): n is a, c, g, or t
  misc_feature (1331)..(1331): n is a, c, g, or t
  misc_feature (1337)..(1338): n is a, c, g, or t
  misc_feature (1341)..(1341): n is a, c, g, or t
  misc_feature (1353)..(1358): n is a, c, g, or t
  misc_feature (1362)..(1362): n is a, c, g, or t
naatagagaaattactatgagaggatcgcatcaccatcaccatcacggatcctatttaggtgacactatagaatcgtcgacccacgcgtccggaagtacatccactcggccgggatcatccaccgggtaggtgcgaccgcagggtgagggtcgggtccagcagggctccgtcccagcctcctgtgctcacgctccgcgtgacctgcaggacctgaagcccagcaacgtggctgtgaacgaggactgtgagctcaggatcctggatttcgggctggcgcgccaggcggacgaggagatgaccggctatgtggccacgcgctggtaccgggcacctgagatcatgctcaactggatgcattacaaccaaacagtggatatctggtccgtgggctgcatcatggctgagctgctccagggcaaggccctcttcccgggaagcgactacattgaccagctgaagcgcatcatggaagtggtgggcacacccagccctgaggttctggcaaaaatctcctcggaacacgcccggacatatatccagtccctgccccccatgccccagaaggacctgagcagcatcttccgtggagccaaccccctggccatagacctccttggaaggatgctggtgctggacagtgaccagagggtcagtgcagctgaggcactggcccacgcctacttcagccagtaccacgaccccgaggatgagccagaggccgagccatatgatgagagcgttgaggccaaggagcgcacgctggaggagtggaaggagctcacttaccaggaagtcctcagcttcaagcccccanagccaccgaagccacctggcagcctggagattgagcagtgaggtgctgcccagcagccccctgaaancctgtggagggcttgggcctgcacccttccacagctggcctggtttcctcgagagncacctcccacactcctatggtcananactttctggcctangaacccctcnccttcaggaaaatctacacncatgttatgcatgcacaaacatgtgtgtacatgtgcttgccatgtgtannaantcngggcaaaantgtccctgggccnancttggncctcctgtccncttntgggnaanggncntttccantggaaactgantggggggtcnaaaaanccaaanggnttccctgggnaattnccctttttgtnccaggcnaaacnaaggaaggtcncctttggnttttttttntcccnnggttttttgaanaaccctnggnccggaacccgnaaaatnaaagaaanntccnggntnaantnccccccngnannanggggtttttnttnnnntnaacccnnttnaaaaaaaaaaannnnnncccnttg

SEQ ID NO: 488 - DNA, 1342 bp, Homo Sapiens; identical to SEQ ID NO: 148
  misc_feature (709)..(709): n is a, c, g, or t
  misc_feature (714)..(714): n is a, c, g, or t
  misc_feature (717)..(717): n is a, c, g, or t
  misc_feature (783)..(783): n is a, c, g, or t
  misc_feature (795)..(795): n is a, c, g, or t
  misc_feature (812)..(812): n is a, c, g, or t
  misc_feature (877)..(877): n is a, c, g, or t
  misc_feature (881)..(881): n is a, c, g, or t
  misc_feature (887)..(887): n is a, c, g, or t
  misc_feature (941)..(941): n is a, c, g, or t
  misc_feature (946)..(946): n is a, c, g, or t
  misc_feature (953)..(953): n is a, c, g, or t
  misc_feature (957)..(957): n is a, c, g, or t
  misc_feature (979)..(979): n is a, c, g, or t
  misc_feature (990)..(990): n is a, c, g, or t
  misc_feature (993)..(993): n is a, c, g, or t
  misc_feature (1000)..(1000): n is a, c, g, or t
  misc_feature (1002)..(1002): n is a, c, g, or t
  misc_feature (1006)..(1006): n is a, c, g, or t
  misc_feature (1012)..(1012): n is a, c, g, or t
  misc_feature (1014)..(1014): n is a, c, g, or t
  misc_feature (1022)..(1022): n is a, c, g, or t
  misc_feature (1035)..(1037): n is a, c, g, or t
  misc_feature (1041)..(1041): n is a, c, g, or t
  misc_feature (1043)..(1044): n is a, c, g, or t
  misc_feature (1050)..(1050): n is a, c, g, or t
  misc_feature (1053)..(1054): n is a, c, g, or t
  misc_feature (1063)..(1063): n is a, c, g, or t
  misc_feature (1068)..(1068): n is a, c, g, or t
  misc_feature (1075)..(1076): n is a, c, g, or t
  misc_feature (1084)..(1125): n is a, c, g, or t
  misc_feature (1131)..(1131): n is a, c, g, or t
  misc_feature (1139)..(1139): n is a, c, g, or t
  misc_feature (1144)..(1147): n is a, c, g, or t
  misc_feature (1149)..(1149): n is a, c, g, or t
  misc_feature (1155)..(1156): n is a, c, g, or t
  misc_feature (1161)..(1161): n is a, c, g, or t
  misc_feature (1164)..(1167): n is a, c, g, or t
  misc_feature (1170)..(1170): n is a, c, g, or t
  misc_feature (1176)..(1176): n is a, c, g, or t
  misc_feature (1180)..(1183): n is a, c, g, or t
  misc_feature (1191)..(1192): n is a, c, g, or t
  misc_feature (1195)..(1196): n is a, c, g, or t
  misc_feature (1201)..(1201): n is a, c, g, or t
  misc_feature (1209)..(1210): n is a, c, g, or t
  misc_feature (1214)..(1214): n is a, c, g, or t
  misc_feature (1224)..(1228): n is a, c, g, or t
  misc_feature (1230)..(1231): n is a, c, g, or t
  misc_feature (1236)..(1236): n is a, c, g, or t
  misc_feature (1240)..(1240): n is a, c, g, or t
  misc_feature (1249)..(1249): n is a, c, g, or t
  misc_feature (1252)..(1252): n is a, c, g, or t
  misc_feature (1256)..(1258): n is a, c, g, or t
  misc_feature (1260)..(1264): n is a, c, g, or t
  misc_feature (1268)..(1268): n is a, c, g, or t
  misc_feature (1271)..(1271): n is a, c, g, or t
  misc_feature (1276)..(1288): n is a, c, g, or t
  misc_feature (1290)..(1290): n is a, c, g, or t
  misc_feature (1292)..(1292): n is a, c, g, or t
  misc_feature (1299)..(1301): n is a, c, g, or t
  misc_feature (1304)..(1305): n is a, c, g, or t
  misc_feature (1307)..(1308): n is a, c, g, or t
  misc_feature (1310)..(1315): n is a, c, g, or t
  misc_feature (1320)..(1321): n is a, c, g, or t
  misc_feature (1324)..(1327): n is a, c, g, or t
  misc_feature (1332)..(1332): n is a, c, g, or t
  misc_feature (1336)..(1339): n is a, c, g, or t
  misc_feature (1342)..(1342): n is a, c, g, or t
